(19) United States
(12) Patent Application Publication
(10) Pub. No.: US 2022/0348619 A1
(43) Pub. Date: Nov. 3, 2022

(54) RARE EARTH ELEMENT (REE)-BINDING PROTEINS

(71) Applicant: Ginkgo Bioworks, Inc., Boston, MA (US)

(72) Inventors: Patrick Boyle, Boston, MA (US); Ramya L. Prathuri, Boston, MA (US); Nathan W. Schmidt, Boston, MA (US); Emily E. Wrenbeck, Boston, MA (US); Mark David Simon, Boston, MA (US)

(73) Assignee: Ginkgo Bioworks, Inc., Boston, MA (US)

(21) Appl. No.: 17/620,654

(22) PCT Filed: Jun. 19, 2020
(86) PCT No.: PCT/US2020/038808

§ 371 Date: Dec. 17, 2021

Related U.S. Application Data
(60) Provisional application No. 62/865,090, filed on Jun. 21, 2019.

(51) Int. Cl. C07K 14/47; C07K 7/08; C22B 3/18; C22B 59/00

(52) U.S. Cl. CPC C07K 14/4728; C07K 7/08; C22B 3/18; C22B 59/00

(57) ABSTRACT

Described in this disclosure are rare earth element (REE)-binding proteins (e.g., lanthanide-binding proteins), host cells expressing the REE-binding proteins, and methods of recovering REEs.

### CROSS REFERENCE TO RELATED APPLICATIONS

[0001] This application claims the benefit under 35 U.S.C. § 119(e) of U.S. Provisional Application No. 62/865,090, filed Jun. 21, 2019, entitled “Rare Earth Element (REE)-Binding Proteins,” the entire disclosure of which is hereby incorporated by reference.

### REFERENCE TO A SEQUENCE LISTING SUBMITTED AS A TEXT FILE VIA EFS-WEB

[0002] The instant application contains a Sequence Listing which has been submitted in ASCII format via EFS-Web and is hereby incorporated by reference in its entirety. Said ASCII copy, created on Jun. 19, 2020, is named G091970032WO00-SEQ-OMJ.txt and is 1.40 megabytes in size.

### FIELD OF THE INVENTION

[0003] The disclosure relates to methods of recovering rare earth elements, including lanthanides.

### BACKGROUND

[0004] Rare earth elements (REEs) are a group of seventeen metals that include lanthanides, yttrium (Y), and scandium (Sc). The lanthanide series of chemical elements comprises elements with atomic numbers 57 through 71 (e.g., lanthanum (La), cerium (Ce), praseodymium (Pr), neodymium (Nd), promethium (Pm), samarium (Sm), europium (Eu), gadolinium (Gd), terbium (Tb), dysprosium (Dy), holmium (Ho), erbium (Er), thulium (Tm), ytterbium (Yb), and lutetium (Lu)). As a key component of many manufactured goods, including electronic devices, REEs are highly sought-after raw materials. Although many REEs are relatively abundant in the earth's crust with the exception of radioactive promethium, REEs are usually dispersed and are not concentrated in rare-earth minerals. Therefore, economical extraction of REEs has been difficult.

### SUMMARY

[0005] The present disclosure is based, at least in part, on the identification of new rare earth element (REE)-binding proteins.

[0006] Aspects of the disclosure relate to methods of recovering a rare earth element (REE) from a sample. In some embodiments, recovering an REE from a sample comprises introducing an REE-binding protein to the sample. In some embodiments, the REE-binding protein comprises an EF-hand domain. In some embodiments, the REE is then recovered from the sample. In some embodiments, the methods further comprise purifying an REE from the sample.

[0007] Further aspects of the disclosure relate to host cells comprising a heterologous gene expressing a rare earth element binding protein. In some embodiments, the rare earth element binding protein in the host cells comprises an EF-hand domain. In some embodiments, the REE binding protein does not comprise SEQ ID NO: 1.

[0008] Further aspects of the disclosure relate to kits comprising any of the host cells disclosed in this application and instructions for extraction of a rare earth element. In some embodiments, the REE binding protein comprises an EF-hand domain.

[0009] In some embodiments, the EF-hand domain comprises the sequence: X₁X₂X₃X₄X₅X₆X₇X₈X₉X₁₀X₁₁X₁₂ (SEQ ID NO: 1275). In some embodiments, X denotes any amino acid. In some embodiments, X₁ is D or K. In some embodiments, X₂ is A, D, E, F, G, H, I, K, L, P, Q, R, S, T, V, or Y. In some embodiments, X₃ is D, E, N, Q, S, or T. In some embodiments, X₄ is A, D, E, G, H, K, L, N, Q, R, S, or T. In some embodiments, X₅ is D, N, S, or T. In some embodiments, X₆ is A, E, G, K, N, Q, R, or S. In some embodiments, X₇ is A, D, E, F, G, H, I, K, L, M, N, Q, R, S, T, V, or Y. In some embodiments, X₈ is A, F, I, L, M, or V. In some embodiments, X₉ is A, D, E, G, L, N, Q, S, T, or V. In some embodiments, X₁₀ is A, D, E, F, G, H, I, K, L, M, N, P, Q, R, S, T, V, or Y. In some embodiments, X₁₁ is A, D, E, F, G, I, K, L, M, N, Q, R, S, T, V, or Y. In some embodiments, X₁₂ is A, D, E, G, I, K, L, Q, R, S, T, or V. In some embodiments, the EF-hand domain additionally comprises X₁₃. In some embodiments, X₁₃ is A, E, F, G, H, I, L, M, Q, R, S, T, V, W, or Y.

[0010] In some embodiments, the EF-hand domain comprises the sequence: DX₁X₂X₃X₄X₅X₆X₇X₈X₉X₁₀X₁₁ (SEQ ID NO: 1276). In some embodiments, X₁ is A, D, F, G, I, K, L, P, Q, R, S, T, V, or Y. In some embodiments, X₂ is D, N, Q, or S. In some embodiments, X₃ is A, D, G, H, K, N, Q, R, or S. In some embodiments, X₄ is D, N, or S. In some embodiments, X₅ is A, E, G, K, N, Q, or R. In some embodiments, X₆ is A, D, E, F, H, I, K, L, M, N, Q, R, S, T, V, or Y. In some embodiments, X₇ is A, F, I, L, or V. In some embodiments, X₈ is D, E, G, N, S, T, or V. In some embodiments, X₉ is A, D, E, F, G, H, I, K, L, M, N, P, Q, R, S, T, V, or Y. In some embodiments, X₁₀ is A, D, E, F, G, I, K, L, N, Q, R, S, T, V, or Y. In some embodiments, X₁₁ is A, D, E, G, L, Q, R, S, T, or V. In some embodiments, the EF-hand domain additionally comprises X₁₂. In some embodiments, X₁₂ is A, E, F, G, H, I, L, M, Q, R, S, V, W, or Y.

[0011] In some embodiments, the EF-hand domain comprises the sequence: DX₁X₂X₃X₄X₅X₆X₇X₈X₉X₁₀X₁₁ (SEQ ID NO: 1277). In some embodiments, X₁ is A, D, F, G, I, K, L, Q, R, S, T, V, or Y. In some embodiments, X₂ is D, N, Q, or S. In some embodiments, X₃ is A, D, G, H, K, N, Q, R, or S. In some embodiments, X₄ is D, N, or S. In some embodiments, X₅ is A, E, G, K, N, Q, or R. In some embodiments, X₆ is A, D, E, F, H, I, K, L, M, N, Q, R, S, T, V, or Y. In some embodiments, X₇ is A, F, I, L, or V. In some embodiments, X₈ is D, E, G, N, S, T, or V. In some embodiments, X₉ is A, D, E, F, G, H, I, K, L, M, N, P, Q, R, S, T, V, or Y. In some embodiments, X₁₀ is A, D, E, F, G, I, K, L, N, Q, R, S, T, V, or Y. In some embodiments, X₁₁ is A, D, E, G, L, Q, R, S, T, or V. In some embodiments, the EF-hand domain additionally comprises X₁₂. In some embodiments, X₁₂ is A, E, F, G, H, I, L, M, Q, R, S, V, W, or Y.

[0012] In some embodiments, the EF-hand domain comprises no more than two amino acid substitutions relative to an EF-hand domain sequence in Table 2, corresponding to SEQ ID NOs: 300-977. In some embodiments, the EF-hand domain comprises a sequence selected from the EF-hand domain sequences in Table 2, corresponding to SEQ ID NOs: 300-977. In some embodiments, the EF-hand domain comprises a sequence selected from SEQ ID NOs: 304-715. In some embodiments, the EF-hand domain comprises a sequence selected from SEQ ID NOs: 304-473.

[0013] In some embodiments, the REE binding protein comprises at least two EF-hand domain sequences. In some embodiments, the REE binding protein comprises at least three EF-hand domain sequences. In some embodiments, the REE binding protein comprises at least four EF-hand domain sequences. In some embodiments, at least two EF-hand domain sequences are different.

[0014] In some embodiments, the REE binding protein is a lanthanide binding protein. In some embodiments, the REE binding protein is a yttrium binding protein. In some embodiments, the REE binding protein is a scandium binding protein. In some embodiments, the REE binding protein is a lanthanide binding protein and a yttrium binding protein. In some embodiments, the REE binding protein is a lanthanide binding protein and a scandium binding protein. In some embodiments, the REE binding protein is a yttrium binding protein and a scandium binding protein. In some embodiments, the REE binding protein is a lanthanide binding protein, a yttrium binding protein, and a scandium binding protein.

[0015] In some embodiments, the REE binding protein has at least 10%, 20%, 30%, 40%, 50%, 60%, 70%, 80%, 90%, or 100% higher lanthanide binding affinity relative to a control protein. In some embodiments, the control protein comprises SEQ ID NO: 2. In some embodiments, the control protein comprises SEQ ID NO: 3. In some embodiments, the binding affinity is determined using a dialysis assay. In some embodiments, the lanthanide is selected from the group consisting of cerium (Ce), dysprosium (Dy), erbium (Er), europium (Eu), gadolinium (Gd), holmium (Ho), lanthanum (La), lutetium (Lu), neodymium (Nd), praseodymium (Pr), promethium (Pm), samarium (Sm), terbium (Tb), thulium (Tm), ytterbium (Yb), and a combination thereof.

[0016] In some embodiments, the REE binding protein has at least 10%, 20%, 30%, 40%, 50%, 60%, 70%, 80%, 90%, or 100% lower iron binding affinity relative to a control protein. In some embodiments, the control protein is TRFE_HUMAN2 (SEQ ID NO: 298). In some embodiments, the control protein is TRFE_BOVIN2 (SEQ ID NO: 299). In some embodiments, the binding affinity is determined using a dialysis assay.

[0017] In some embodiments, the REE binding protein is expressed as a heterologous gene in a host cell. In some embodiments, the REE binding protein is secreted from the host cell. In some embodiments, the REE-binding protein comprises a sequence that is at least 90% identical to any one of SEQ ID NOs: 4-71. In some embodiments, the REE-binding protein comprises any one of SEQ ID NOs: 4-71. In some embodiments, the REE-binding protein comprises at least 90% identity to the portion of any one of SEQ ID NOs: 4-71 outside of the EF hand domains within the sequence, and comprises no more than two amino acid substitutions relative to the EF-hand domain(s) within the sequence.

[0018] Each of the limitations of the invention can encompass various embodiments of the invention. It is, therefore, anticipated that each of the limitations of the invention involving any one element or combinations of elements can be included in each aspect of the invention. This invention is not limited in its application to the details of construction and the arrangement of components set forth in the following description or illustrated in the drawings. The invention is capable of other embodiments and of being practiced or of being carried out in various ways. Also, the phraseology and terminology used in this disclosure is for the purpose of description and should not be regarded as limiting. The use of “including,” “comprising,” or “having,” “containing,” “involving,” and variations of thereof in this disclosure, is meant to encompass the items listed thereafter and equivalents thereof as well as additional items.

### BRIEF DESCRIPTION OF DRAWINGS

[0019] The accompanying drawings are not intended to be drawn to scale. The drawings are illustrative only and are not required for enablement of the disclosure. For purposes of clarity, not every component may be labeled in every drawing. In the drawings:

[0020] FIG. 1 shows the total number of EF-hand domains in putative lanthanide-binding proteins from four different samples (Sample 1, Sample 2 (Tailings), Sample 3, and Sample 4). From left to right for each number, the sources correspond to Sample 1, Sample 2 (Tailings), Sample 3, and Sample 4. Sample 2 (Tailings) refers to a sample with a high level of dysprosium and other lanthanides.

[0021] FIG. 2 is a schematic showing an overview of metal-binding affinity characterization of candidate lanthanide-binding proteins. Cells were transformed with plasmids encoding candidate lanthanide-binding proteins that comprise one or more EF-hand domains. The candidate proteins were expressed, purified and analyzed using a Xylenol Orange (XO) based terbium competition assay in a primary screen and in dialysis and chromatography assays in a secondary screen. The binding selectivity of top hits for terbium as compared to iron was also characterized.

[0022] FIG. 3 includes schematics depicting a primary screen to identify lanthanide-binding proteins (LBP). An illustration of the XO competition assay is shown on the left. A pie chart showing the breakdown of proteins measured in the primary screen is provided on the right.

[0023] FIG. 4 includes two graphs showing identification of proteins that bind the lanthanide metal terbium using the primary screen depicted in FIG. 3. The top graph depicts data from the XO competition assays for all candidate lanthanide-binding proteins (which are referred to as “Strains”). The bottom graph depicts representative hits discovered by the primary screen. In the bottom graph, the strains in Batch 1 included: t201150, t201097, t200855, t201015, t200947, t200901, t200881, t201161, t201209, t200928, t200955, t200879, t200862, t200769, t200987, t200701, t201213, t200733, and t200949; the strains in Batch 2 included: t201777, t201380, t201734, t201629, t201856, t201782, t201817, t201697, t201609, t201647, t201742, t201599, t201897, t201314, t201750, t201859, t201631, t201795, and t201779; the strains in Batch 3 included: t201331, t201245, t201369, t201380, t201726, t201734, t201463, t201856, t201277, t201539, t201413, t201595, t201587, t201406, t201425, t201285, t201547, t201424, t201217, and t201253; and the strains in Batch 4 included: t200581, t200773, t200818, t200603, t200741, t200574, t200830, t200594, t200701, t200586, t200753, t200666, t200795, t200784, t200791, t200770, t200832, t200729, and t200628.

[0024] FIG. 5 includes data showing the terbium-binding affinity of candidate lanthanide-binding proteins. The left graph shows results from a dialysis-plate assay for all proteins (294 candidate lanthanide-binding proteins plus three positive controls). The right graph shows the fluorescence signal normalized by protein sample concentration, considering only strains (proteins) with protein concentrations greater than or equal to 20 μM. The positive controls are indicated by three arrows. The two lower-affinity terbium-binder controls are designed lanthanide-binding proteins and the single higher-affinity control strain is the lanthanide-binding protein, LanM, from a lanthanide-utilizing bacterium.

[0025] FIG. 6 includes graphs showing the affinity of lanthanide binding proteins for dysprosium and iron. Dialysis-plate assay results for the 23 best-binder proteins from the terbium experiments after overnight incubation with 2 μM dysprosium (left) or 2 μM iron (right) are shown. The graph on the left shows the amount of bound dysprosium quantified by Delfia fluorescence assay by measuring emission at 572 nm following excitation at 320 nm. The intensity signal is normalized to protein concentration, and strains are ranked in order from lowest (left-hand side of plot) to highest (right-hand side of plot) affinity for dysprosium. The positive controls (arrows) are the same as in the terbium experiments. The graph on the right shows iron-binding quantified through Fe-ferrozine complexation by measuring the absorbance at 560 nm (Abs560). Proteins are ranked according to their protein concentration-normalized iron-binding abilities. In these assays, high iron-binding affinity bovine and human transferrin proteins (far right-hand side, double arrows) are used as positive controls.

### DETAILED DESCRIPTION

[0026] Rare earth elements (REEs) have diverse uses and are critical to the production of catalysts, alloys, high-performance magnets, glasses, and electronics. Despite the abundance of REEs in the earth's crust, however, mineable ore deposits are rare. This disclosure is premised, in part, on the identification of multiple REE-binding proteins. REE-binding proteins described in this disclosure may be leveraged to recover REEs from samples, including recovery of REEs from machining waste and from electronic waste. Accordingly, provided in this disclosure are newly-identified REE-binding proteins, host cells comprising the REE-binding proteins, and methods of using the REE-binding proteins to recover REEs.

[0027] REEs comprise a group of metals including lanthanides, yttrium (Y), and scandium (Sc). The lanthanides (or lanthanoids) are elements with atomic numbers 57 through 71 (e.g., lanthanum (La), cerium (Ce), praseodymium (Pr), neodymium (Nd), promethium (Pm), samarium (Sm), europium (Eu), gadolinium (Gd), terbium (Tb), dysprosium (Dy), holmium (Ho), erbium (Er), thulium (Tm), ytterbium (Yb), and lutetium (Lu), respectively). The metallic radius of the lanthanides are as follows: La: 162 pm; Ce: 181.8 pm; Pr: 182.4 pm; Nd: 181.4 pm; Pm: 183.4 pm; Sm: 180.4 pm; Eu: 208.4 pm; Gd: 180.4 pm; Tb: 177.3 pm; Dy: 178.1 pm; Ho: 176.2 pm; Er: 176.1 pm; Tm: 175.9 pm; Yb: 193.3 pm; and Lu: 173.8 pm. Yttrium is a metal with atomic number 39 and an atomic radius of 180 pm. Scandium is a metal with atomic number 21 and an atomic radius of 162 pm. The ionic radius of the rare earth elements are as follows: La: 1.045 Å; Ce: 1.01 Å; Pr: 0.997 Å; Nd: 0.983 Å; Pm: 0.97 Å; Sm: 0.958 Å; Eu: 0.947 Å; Gd: 0.938 Å; Tb: 0.923 Å; Dy: 0.912 Å; Ho: 0.901 Å; Er: 0.89 Å; Tm: 0.88 Å; Yb: 0.868 Å; Lu: 0.861 Å; Sc: 0.745 Å; and Y: 0.9 Å. The crystal radius value of each rare earth element is also known. See, e.g., Shannon, Acta Cryst. (1976). A32, 751-767.

### Rare Earth Element (REE)-Binding Proteins

[0028] Aspects of the present disclosure provide rare earth element (REE)-binding proteins, which may be useful, for example, in the recovery of a REE from a sample. In some embodiments, the REE-binding proteins of the present disclosure comprise an EF-hand domain. EF-hand domains are motifs involved in binding to metals and are commonly found in calcium-binding proteins. EF-hand domains are described further in Cotruvo et al. (2018) J. Am. Chem. Soc. 140(44):15056-15061, incorporated by reference in this application in its entirety. Without wishing to be bound by any theory, the EF-hand binding domain is relatively compact, suggesting that the ratio of protein to lanthanide will be higher than for other metal-binding domains known in the art. Accordingly, EF-hand domains may be useful as a potential filtering agent for metals of interest. In some embodiments, a metal of interest is a REE. In some embodiments, a metal of interest is a transition metal. In some embodiments, a metal of interest is a lanthanide.

[0029] As discussed in Example 1, a large number of proteins with multiple EF-hand domains were identified in this disclosure. The presence of multiple EF-hand domains in individual proteins suggests that these proteins may be able to bind multiple lanthanide atoms per protein. Samples that were extracted from lanthanide-rich tailing ponds comprised numerous proteins with at least two EF-hand domains per protein.

[0030] In some embodiments, an EF-hand domain comprises a contiguous sequence of at least twelve amino acids with the sequence X₁X₂X₃X₄X₅X₆X₁X₈X₉X₁₀X₁₁X₁₂ (SEQ ID NO: 1275), wherein X denotes any amino acid, X₁ is D or K; X₂ is A, D, E, F, G, H, I, K, L, P, Q, R, S, T, V, or Y; X₃ is D, E, N, Q, S, or T; X₄ is A, D, E, G, H, K, L, N, Q, R, S, or T; X₅ is D, N, S, or T; X₆ is A, E, G, K, N, Q, R, or S; X₇ is A, D, E, F, G, H, I, K, L, M, N, Q, R, S, T, V, or Y; X₈ is A, F, I, L, M, or V; X₉ is A, D, E, G, L, N, Q, S, T, or V; X₁₀ is A, D, E, F, G, H, I, K, L, M, N, P, Q, R, S, T, V, or Y; X₁₁ is A, D, E, F, G, I, K, L, M, N, Q, R, S, T, V, or Y; and X₁₂ is A, D, E, G, I, K, L, Q, R, S, T, or V.

[0031] In some embodiments, an EF-hand domain comprises a contiguous sequence of at least thirteen amino acids with the sequence X₁X₂X₃X₄X₅X₆X₇X₈X₉X₁₀X₁₁X₁₂X₁₃ (SEQ ID NO: 1275), wherein X denotes any amino acid, X₁ is D or K; X₂ is A, D, E, F, G, H, I, K, L, P, Q, R, S, T, V, or Y; X₃ is D, E, N, Q, S, or T; X₄ is A, D, E, G, H, K, L, N, Q, R, S, or T; X₅ is D, N, S, or T; X₆ is A, E, G, K, N, Q, R, or S; X₇ is A, D, E, F, G, H, I, K, L, M, N, Q, R, S, T, V, or Y; X₈ is A, F, I, L, M, or V; X₉ is A, D, E, G, L, N, Q, S, T, or V; X₁₀ is A, D, E, F, G, H, I, K, L, M, N, P, Q, R, S, T, V, or Y; X₁₁ is A, D, E, F, G, I, K, L, M, N, Q, R, S, T, V, or Y; and X₁₂ is A, D, E, G, I, K, L, Q, R, S, T, or V; and X₁₃ is A, E, F, G, H, I, L, M, Q, R, S, T, V, W, or Y.

[0032] In some embodiments, an EF-hand domain comprises a contiguous sequence of at least twelve amino acids with the sequence DX₁X₂X₃X₄X₅X₆X₇X₈X₉X₁₀X₁₁ (SEQ ID NO: 1276), wherein X denotes any amino acid, X₁ is A, D, F, G, I, K, L, P, Q, R, S, T, V, or Y; X₂ is D, N, Q, or S; X₃ is A, D, G, H, K, N, Q, R, or S; X₄ is D, N, or S; X₅ is A, E, G, K, N, Q, or R; X₆ is A, D, E, F, H, I, K, L, M, N, Q, R, S, T, V, or Y; X₇ is A, F, I, L, or V; X₈ is D, E, G, N, S, T, or V; X₉ is A, D, E, F, G, H, I, K, L, M, N, P, Q, R, S, T, V, or Y; X₁₀ is A, D, E, F, G, I, K, L, N, Q, R, S, T, V, or Y; and X₁₁ is A, D, E, G, L, Q, R, S, T, or V.

[0033] In some embodiments, an EF-hand domain comprises a contiguous sequence of at least thirteen amino acids with the sequence DX₁X₂X₃X₄X₅X₆X₇X₈X₉X₁₀X₁₁X₁₂ (SEQ ID NO: 1276), wherein X denotes any amino acid, X₁ is A, D, F, G, I, K, L, P, Q, R, S, T, V, or Y; X₂ is D, N, Q, or S; X₃ is A, D, G, H, K, N, Q, R, or S; X₄ is D, N, or S; X₅ is A, E, G, K, N, Q, or R; X₆ is A, D, E, F, H, I, K, L, M, N, Q, R, S, T, V, or Y; X₇ is A, F, I, L, or V; X₈ is D, E, G, N, S, T, or V; X₉ is A, D, E, F, G, H, I, K, L, M, N, P, Q, R, S, T, V, or Y; X₁₀ is A, D, E, F, G, I, K, L, N, Q, R, S, T, V, or Y; X₁₁ is A, D, E, G, L, Q, R, S, T, or V; and X₁₂ is A, E, F, G, H, I, L, M, Q, R, S, V, W, Y.

[0034] In some embodiments, an EF-hand domain comprises a contiguous sequence of at least twelve amino acids with the sequence DX₁X₂X₃X₄X₅X₆X₇X₈X₉X₁₀X₁₁ (SEQ ID NO: 1277), wherein X denotes any amino acid, X₁ is A, D, F, G, I, K, L, Q, R, S, T, V, or Y; X₂ is D, N, Q, or S; X₃ is A, D, G, H, K, N, Q, R, or S; X₄ is D, N, or S; X₅ cis A, E, G, K, N, Q, or R; X₆ is A, D, E, F, H, I, K, L, M, N, Q, R, S, T, V, or Y; X₇ is A, F, I, L, or V; X₈ is D, E, G, N, S, T, or V; X₉ is A, D, E, F, G, H, I, K, L, M, N, P, Q, R, S, T, V, or Y; X₁₀ is A, D, E, F, G, I, K, L, N, Q, R, S, T, V, or Y; and X₁₁ is A, D, E, G, L, Q, R, S, T, or V.

[0035] In some embodiments, an EF-hand domain comprises a contiguous sequence of at least twelve amino acids with the sequence DX₁X₂X₃X₄X₅X₆X₇X₈X₉X₁₀X₁₁X₁₂ (SEQ ID NO: 1277), wherein X denotes any amino acid, X₁ is A, D, F, G, I, K, L, Q, R, S, T, V, or Y; X₂ is D, N, Q, or S; X₃ is A, D, G, H, K, N, Q, R, or S; X₄ is D, N, or S; X₅ is A, E, G, K, N, Q, or R; X₆ is A, D, E, F, H, I, K, L, M, N, Q, R, S, T, V, or Y; X₇ is A, F, I, L, or V; X₈ is D, E, G, N, S, T, or V; X₉ is A, D, E, F, G, H, I, K, L, M, N, P, Q, R, S, T, V, or Y; X₁₀ is A, D, E, F, G, I, K, L, N, Q, R, S, T, V, or Y; X₁₁ is A, D, E, G, L, Q, R, S, T, or V; and X₁₂ is A, E, F, G, H, I, L, M, Q, R, S, V, W, or Y.

[0036] In some instances, the EF-hand domain comprises a contiguous stretch of at least 12, 13, 14, 15, 16, 17, 18, 19, 20, 21, 22, 23, 24, 25, 26, 27, 28, 29, or at least 30 amino acids.

[0037] In some instances, the EF-hand domain comprises a helix-loop-helix structure. In some instances, the loop in the helix-loop-helix structure comprises any of the EF-hand domain sequences described in this disclosure. In some embodiments, the loop in the helix-loop-helix structure binds one or more metal ions. In some embodiments, an EF-hand domain has a tertiary structure that is similar to the tertiary structure of an EF-hand domain that binds Ca2+.

[0038] The EF-hand domain may comprise a sequence that is at least 5%, at least 10%, at least 15%, at least 20%, at least 25%, at least 30%, at least 35%, at least 40%, at least 45%, at least 50%, at least 55%, at least 60%, at least 65%, at least 70%, at least 71%, at least 72%, at least 73%, at least 74%, at least 75%, at least 76%, at least 77%, at least 78%, at least 79%, at least 80%, at least 81%, at least 82%, at least 83%, at least 84%, at least 85%, at least 86%, at least 87%, at least 88%, at least 89%, at least 90%, at least 91%, at least 92%, at least 93%, at least 94%, at least 95%, at least 96%, at least 97%, at least 98%, at least 99%, or is 100% identical to a EF-hand domain sequence in Table 2 (e.g., a sequence selected from SEQ ID NOs: 300-977, 300-715, 304-473, or 304-715).

[0039] An REE-binding protein may comprise at least 1, at least 2, at least 3, at least 4, at least 5, at least 6, at least 7, at least 8, at least 9, at least 10, at least 11, at least 12, at least 13, at least 14, at least 15, at least 16, at least 17, at least 18, at least 19, at least 20, at least 25, at least 30, at least 35, at least 40, at least 45, or at least 50 EF-hand domains.

[0040] In some instances, in an REE-binding protein that comprises more than 1 EF-hand domain, at least at least 2, at least 3, at least 4, at least 5, at least 6, at least 7, at least 8, at least 9, at least 10, at least 11, at least 12, at least 13, at least 14, at least 15, at least 16, at least 17, at least 18, at least 19, at least 20, at least 25, at least 30, at least 35, at least 40, at least 45, or at least 50 EF-hand domains in the REE-binding protein are different.

[0041] In some instances, in an REE-binding protein that comprises more than 1 EF-hand domain, at least 2, at least 3, at least 4, at least 5, at least 6, at least 7, at least 8, at least 9, at least 10, at least 11, at least 12, at least 13, at least 14, at least 15, at least 16, at least 17, at least 18, at least 19, at least 20, at least 25, at least 30, at least 35, at least 40, at least 45, or at least 50 EF-hand domains in the REE-binding protein are the same.

[0042] REE-binding proteins may comprise a sequence that is at least 5%, at least 10%, at least 15%, at least 20%, at least 25%, at least 30%, at least 35%, at least 40%, at least 45%, at least 50%, at least 55%, at least 60%, at least 65%, at least 70%, at least 71%, at least 72%, at least 73%, at least 74%, at least 75%, at least 76%, at least 77%, at least 78%, at least 79%, at least 80%, at least 81%, at least 82%, at least 83%, at least 84%, at least 85%, at least 86%, at least 87%, at least 88%, at least 89%, at least 90%, at least 91%, at least 92%, at least 93%, at least 94%, at least 95%, at least 96%, at least 97%, at least 98%, at least 99%, or is 100% identical, including all values in between, to a sequence (e.g., nucleic acid or amino acid sequence) in Table 2 or to a sequence selected from SEQ ID NOs: 1-297, 1-179, 4-71, 4-179, 978-1274, 981-1274, 981-1156, or 981-1048.

[0043] An REE-binding protein may be capable of binding one or more REEs. For example, the REE may be capable of binding lanthanum (La), cerium (Ce), praseodymium (Pr), neodymium (Nd), promethium (Pm), samarium (Sm), europium (Eu), gadolinium (Gd), terbium (Tb), dysprosium (Dy), holmium (Ho), erbium (Er), thulium (Tm), ytterbium (Yb), lutetium (Lu), yttrium (Y), scandium (Sc) or a combination thereof. In some instances, the REE-binding protein is a lanthanum (La)-binding protein, a cerium (Ce)-binding protein, a praseodymium (Pr)-binding protein, a neodymium (Nd)-binding protein, a promethium (Pm)-binding protein, a samarium (Sm)-binding protein, an europium (Eu)-binding protein, a gadolinium (Gd)-binding protein, a terbium (Tb)-binding protein, a dysprosium (Dy), a holmium (Ho), an erbium (Er), a thulium (Tm), an ytterbium (Yb), a lutetium (Lu)-binding protein, an yttrium (Y)-binding protein, a scandium (Sc)-binding protein, or a combination thereof. In some instances, the REE-binding protein is a lanthanide-binding protein.

[0044] Without being bound by a particular theory, metal ion valence and size of the metal ion may influence EF-hand metal binding affinity. For example, scandium and yttrium ions are usually trivalent cations in solution, just like the lanthanides terbium and dysprosium. The ionic radius of yttrium (104 pm) is similar to that of terbium (106 pm) and dysprosium (105 pm), while scandium is somewhat smaller (89 pm). Without being by bound a particular theory, given the ionic radii, proteins that bind lanthanides with high affinity will have likely have high affinity for yttrium and may also bind scandium.

[0045] An REE-binding protein may be capable of binding at least 1, at least 2, at least 3, at least 4, at least 5, at least 6, at least 7, at least 8, at least 9, at least 10, at least 11, at least 12, at least 13, at least 14, at least 15, at least 16, at least 17, at least 18, at least 19, at least 20, at least 25, at least 30, at least 35, at least 40, at least 45, or at least 50 REE ions. In some instances, an REE-binding protein is capable of binding at least 2, at least 3, at least 4, at least 5, at least 6, at least 7, at least 8, at least 9, at least 10, at least 11, at least 12, at least 13, at least 14, at least 15, at least 16, at least 17, at least 18, at least 19, at least 20, at least 25, at least 30, at least 35, at least 40, at least 45, or at least 50 of the same type of REE ions. In some instances, an REE-binding protein is capable of binding at least 2, at least 3, at least 4, at least 5, at least 6, at least 7, at least 8, at least 9, at least 10, at least 11, at least 12, at least 13, at least 14, at least 15, at least 16, at least 17, at least 18, at least 19, at least 20, at least 25, at least 30, at least 35, at least 40, at least 45, or at least 50 different types of REE ions.

[0046] It should be appreciated that binding affinity of a REE-binding protein can be measured by any means known to one of ordinary skill in the art. In some embodiments, the binding affinity of a REE-binding protein may be measured using a metal competition assay. Non-limiting examples of assays to measure the affinity of a REE-binding protein for a particular metal include a Xylenol Orange (XO) competition assay, a dialysis assay, absorption spectroscopy, fluorescence spectroscopy, x-ray spectroscopy, capillary electrophoresis, circular dichroism, and isothermal titration calorimetry. For example, an REE-binding dialysis-based assay may be used to measure the REE-binding affinity of a particular REE-binding protein. In some embodiments, the REE is a lanthanide. In some embodiments, the REE is dysprosium or terbium. In some instances, the affinity of a REE-binding protein to a particular metal is normalized to the concentration of protein used. The iron-binding affinity of an REE-binding protein may be measured using any method known in the art, including a Ferrozine chromogenic assay. See also, e.g., Farrell et al., Protoplasma 1990, 159, 157-167; Rasmussen et al., Inorg. Biochem. 2003, 95, 113-123; Hebenstreit and Ferreira, Allergy 2005, 60, 1208-1211; Saboury et al., Therm. Anal. Calorim. 2006, 83, 175-179; and the Examples below for methods of measuring the affinity of a metal ion for a protein.

[0047] In some instances, the affinity of a metal ion M for protein ligand P is defined as the dissociation constant K_{D}=[M][P]/[MP]. In some instances, the K_{D} is less than 1×10⁻⁵M, less than 5×10⁻⁶M, less than 1×10⁻⁶M, less than 5×10⁻⁷M, less than 1×10⁻⁷M, less than 5×10⁻⁸M, less than 1×10⁻⁸M, less than 5×10⁻⁹M, less than 1×10⁻⁹M, less than 5×10⁻¹⁰ M, less than 1×10⁻¹⁰ M, less than 5×10⁻¹¹M, less than 1×10⁻¹¹M, less than 5×10⁻¹²M, less than 1×10⁻¹²M, less than 5×10⁻¹³M, less than 1×10⁻¹³M, less than 1×10⁻¹⁴M, less than 5×10⁻¹⁴M, less than 5×10⁻¹⁵M, less than 1×10⁻¹⁵M, less than 5×10⁻¹⁶M, less than 1×10⁻¹⁶ M, less than 5×10⁻¹⁷M, less than 1×10⁻¹⁷M, less than 5×10⁻¹⁸M, less than 1×10⁻¹⁸M, less than 5×10⁻¹⁹M, less than 1×10⁻¹⁹M, less than 5×10⁻²⁰ M, or less than 1×10⁻²⁰ M, including any values in between.

[0048] The affinity of an REE-binding protein for different metals may also be compared. The affinity of an REE-binding protein for an REE may be at least 1.5-fold, at least 2-fold, at least 3-fold, at least 4-fold, at least 5-fold, at least 6-fold, at least 7-fold, at least 8-fold, at least 9-fold, at least 10-fold, at least 15-fold, at least 20-fold, at least 30-fold, at least 40-fold, at least 50-fold, at least 60-fold, at least 70-fold, at least 80-fold, at least 90-fold, at least 100-fold, at least 200-fold, at least 300-fold, at least 400-fold, at least 500-fold, at least 600-fold, at least 700-fold, at least 800-fold, at least 900-fold, or at least 1,000-fold, including any values in between, greater than the affinity of the REE-binding protein for another metal (e.g., a different REE, iron, or calcium).

[0049] The affinity of an REE-binding protein for a particular metal may also be compared to the affinity of a control protein for the same metal. Non-limiting examples of control proteins can include, for example, one or more of SEQ ID NO: 1, SEQ ID NO: 2, SEQ ID NO: 3, SEQ ID NO: 298 and SEQ ID NO: 299. For example, the affinity of an REE-binding protein for a metal may be at least 1.5-fold, at least 2-fold, at least 3-fold, at least 4-fold, at least 5-fold, at least 6-fold, at least 7-fold, at least 8-fold, at least 9-fold, at least 10-fold, at least 15-fold, at least 20-fold, at least 30-fold, at least 40-fold, at least 50-fold, at least 60-fold, at least 70-fold, at least 80-fold, at least 90-fold, at least 100-fold, at least 200-fold, at least 300-fold, at least 400-fold, at least 500-fold, at least 600-fold, at least 700-fold, at least 800-fold, at least 900-fold, or at least 1,000-fold greater than the affinity of a control protein for the same metal.

### Variants

[0050] Variants of sequences described in the present disclosure (e.g., EF-hand domains and/or REE-binding proteins) are also encompassed by the present disclosure. A variant may share at least 5%, at least 10%, at least 15%, at least 20%, at least 25%, at least 30%, at least 35%, at least 40%, at least 45%, at least 50%, at least 55%, at least 60%, at least 65%, at least 70%, at least 71%, at least 72%, at least 73%, at least 74%, at least 75%, at least 76%, at least 77%, at least 78%, at least 79%, at least 80%, at least 81%, at least 82%, at least 83%, at least 84%, at least 85%, at least 86%, at least 87%, at least 88%, at least 89%, at least 90%, at least 91%, at least 92%, at least 93%, at least 94%, at least 95%, at least 96%, at least 97%, at least 98%, at least 99%, or 100% nucleic acid and/or amino acid sequence identity with a reference sequence, including all values in between.

[0051] In some embodiments, variants include proteins in which the EF-hand domain(s) within a protein are 100% conserved, but other portions of the protein may be less conserved. For example, in some embodiments, a variant may share at least 5%, at least 10%, at least 15%, at least 20%, at least 25%, at least 30%, at least 35%, at least 40%, at least 45%, at least 50%, at least 55%, at least 60%, at least 65%, at least 70%, at least 71%, at least 72%, at least 73%, at least 74%, at least 75%, at least 76%, at least 77%, at least 78%, at least 79%, at least 80%, at least 81%, at least 82%, at least 83%, at least 84%, at least 85%, at least 86%, at least 87%, at least 88%, at least 89%, at least 90%, at least 91%, at least 92%, at least 93%, at least 94%, at least 95%, at least 96%, at least 97%, at least 98%, or at least 99% nucleic acid and/or amino acid sequence identity with the portion of a reference sequence that excludes the EF-hand domain(s), including all values in between, while sharing 100% sequence identity with the EF-hand domain(s) of the reference sequence.

[0052] Unless otherwise noted, the term “sequence identity,” as known in the art, refers to a relationship between the sequences of two polypeptides or polynucleotides, as determined by sequence comparison (alignment). In some embodiments, sequence identity is determined across the entire length of a sequence (e.g., EF-hand domains and/or REE-binding proteins). In some embodiments, sequence identity is determined over a region (e.g., a stretch of amino acids or nucleic acids, e.g., the sequence spanning an active site) of a sequence (e.g., EF-hand domains and/or REE-binding proteins) or a region that does not span the active site (e.g., the portion of a nucleic acid or protein sequence that excludes EF-hand domains).

[0053] Identity can also refer to the degree of sequence relatedness between two sequences as determined by the number of matches between strings of two or more residues (e.g., nucleic acid or amino acid residues). Identity measures the percent of identical matches between two or more sequences with gap alignments (if any) addressed by a particular mathematical model or computer program (e.g., algorithms).

[0054] Identity of related polypeptides or nucleic acid sequences can be readily calculated by any of the methods known to one of ordinary skill in the art. The “percent identity” of two sequences (e.g., nucleic acid or amino acid sequences) may, for example, be determined using the algorithm of Karlin and Altschul Proc. Natl. Acad. Sci. USA 87:2264-68, 1990, modified as in Karlin and Altschul Proc. Natl. Acad. Sci. USA 90:5873-77, 1993. Such an algorithm is incorporated into the NBLAST® and XBLAST® programs (version 2.0) of Altschul et al., J. Mol. Biol. 215:403-10, 1990. BLAST® protein searches can be performed, for example, with the XBLAST program, score=50, wordlength=3 to obtain amino acid sequences homologous to the proteins described in this disclosure. Where gaps exist between two sequences, Gapped BLAST® can be utilized, for example, as described in Altschul et al., Nucleic Acids Res. 25(17):3389-3402, 1997. When utilizing BLAST® and Gapped BLAST® programs, the default parameters of the respective programs (e.g., XBLAST® and NBLAST®) can be used, or the parameters can be adjusted appropriately as would be understood by one of ordinary skill in the art.

[0055] Another local alignment technique which may be used, for example, is based on the Smith-Waterman algorithm (Smith, T. F. & Waterman, M. S. (1981) “Identification of common molecular subsequences.” J. Mol. Biol. 147:195-197). A general global alignment technique which may be used, for example, is the Needleman-Wunsch algorithm (Needleman, S. B. & Wunsch, C. D. (1970) “A general method applicable to the search for similarities in the amino acid sequences of two proteins.” J. Mol. Biol. 48:443-453), which is based on dynamic programming.

[0056] More recently, a Fast Optimal Global Sequence Alignment Algorithm (FOGSAA) was developed that purportedly produces global alignment of nucleic acid and amino acid sequences faster than other optimal global alignment methods, including the Needleman-Wunsch algorithm. In some embodiments, the identity of two polypeptides is determined by aligning the two amino acid sequences, calculating the number of identical amino acids, and dividing by the length of one of the amino acid sequences. In some embodiments, the identity of two nucleic acids is determined by aligning the two nucleotide sequences and calculating the number of identical nucleotide and dividing by the length of one of the nucleic acids.

[0057] For multiple sequence alignments, computer programs including Clustal Omega (Sievers et al., Mol Syst Biol. 2011 Oct. 11; 7:539) may be used.

[0058] In preferred embodiments, a sequence, including a nucleic acid or amino acid sequence, is found to have a specified percent identity to a reference sequence, such as a sequence disclosed in this application and/or recited in the claims when sequence identity is determined using the algorithm of Karlin and Altschul Proc. Natl. Acad. Sci. USA 87:2264-68, 1990, modified as in Karlin and Altschul Proc. Natl. Acad. Sci. USA 90:5873-77, 1993 (e.g., BLAST®, NBLAST®, XBLAST® or Gapped BLAST® programs, using default parameters of the respective programs).

[0059] In some embodiments, a sequence, including a nucleic acid or amino acid sequence, is found to have a specified percent identity to a reference sequence, such as a sequence disclosed in this application and/or recited in the claims when sequence identity is determined using the Smith-Waterman algorithm (Smith, T. F. & Waterman, M. S. (1981) “Identification of common molecular subsequences.” J. Mol. Biol. 147:195-197) or the Needleman-Wunsch algorithm (Needleman, S. B. & Wunsch, C. D. (1970) “A general method applicable to the search for similarities in the amino acid sequences of two proteins.” J. Mol. Biol. 48:443-453) using default parameters.

[0060] In some embodiments, a sequence, including a nucleic acid or amino acid sequence, is found to have a specified percent identity to a reference sequence, such as a sequence disclosed in this application and/or recited in the claims when sequence identity is determined using a Fast Optimal Global Sequence Alignment Algorithm (FOGSAA) using default parameters.

[0061] In some embodiments, a sequence, including a nucleic acid or amino acid sequence, is found to have a specified percent identity to a reference sequence, such as a sequence disclosed in this application and/or recited in the claims when sequence identity is determined using Clustal Omega (Sievers et al., Mol Syst Biol. 2011 Oct. 11; 7:539) using default parameters.

[0062] As used in this disclosure, and as would be understood by one of ordinary skill in the art, a residue (such as a nucleic acid residue or an amino acid residue) in sequence “X” is referred to as corresponding to a position or residue (such as a nucleic acid residue or an amino acid residue) “Z” in a different sequence “Y” when the residue in sequence “X” is at the counterpart position of “Z” in sequence “Y” when sequences X and Y are aligned using amino acid sequence alignment tools known in the art, such as, for example, Clustal Omega or BLAST®.

[0063] As used in this disclosure, variant sequences may be homologous sequences. As used in this disclosure, homologous sequences refers to sequences (e.g., nucleic acid or amino acid sequences) that share a certain percent identity (e.g., at least 5%, at least 10%, at least 15%, at least 20%, at least 25%, at least 30%, at least 35%, at least 40%, at least 45%, at least 50%, at least 55%, at least 60%, at least 65%, at least 70%, at least 71%, at least 72%, at least 73%, at least 74%, at least 75%, at least 76%, at least 77%, at least 78%, at least 79%, at least 80%, at least 81%, at least 82%, at least 83%, at least 84%, at least 85%, at least 86%, at least 87%, at least 88%, at least 89%, at least 90%, at least 91%, at least 92%, at least 93%, at least 94%, at least 95%, at least 96%, at least 97%, at least 98%, at least 99%, or 100% percent identity, including all values in between). Homologous sequences include but are not limited to paralogous or orthologous sequences. Paralogous sequences arise from duplication of a gene within a genome of a species, while orthologous sequences diverge after a speciation event.

[0064] In some embodiments, a peptide or polypeptide variant (e.g., EF-hand domain or REE-binding protein variant) comprises a domain that shares a secondary structure (e.g., alpha helix, beta sheet) with a reference peptide or polypeptide (e.g., a reference EF-hand domain or REE-binding protein). In some embodiments, a peptide or polypeptide variant (e.g., EF-hand domain or REE-binding protein variant) shares a tertiary structure with a reference peptide or polypeptide (e.g., a reference EF-hand domain or REE-binding protein). As a non-limiting example, a variant peptide or polypeptide (e.g., EF-hand domain or REE-binding protein) may have low primary sequence identity (e.g., less than 80%, less than 75%, less than 70%, less than 65%, less than 60%, less than 55%, less than 50%, less than 45%, less than 40%, less than 35%, less than 30%, less than 25%, less than 20%, less than 15%, less than 10%, or less than 5% sequence identity) compared to a reference polypeptide, but share one or more secondary structures (e.g., including but not limited to loops, alpha helices, or beta sheets), or have the same tertiary structure as a reference EF-hand domain or REE-binding protein. For example, a loop may be located between two alpha helices, or between two beta sheets. Homology modeling may be used to compare two or more tertiary structures.

[0065] Any suitable method, including circular permutation (Yu and Lutz, Trends Biotechnol. 2011 January; 29(1):18-25), may be used to produce such variants. In circular permutation, the linear primary sequence of a polypeptide can be circularized (e.g., by joining the N-terminal and C-terminal ends of the sequence) and the polypeptide can be severed (“broken”) at a different location. Thus, the linear primary sequence of the new polypeptide may have low sequence identity (e.g., less than 80%, less than 75%, less than 70%, less than 65%, less than 60%, less than 55%, less than 50%, less than 45%, less than 40%, less than 35%, less than 30%, less than 25%, less than 20%, less than 15%, less than 10%, less or less than 5%, including all values in between) as determined by linear sequence alignment methods (e.g., Clustal Omega or BLAST). Topological analysis of the two proteins, however, may reveal that the tertiary structure of the two polypeptides is similar. Without being bound by a particular theory, a variant polypeptide created through circular permutation of a reference polypeptide and with a tertiary structure that is similar to the tertiary structure of the reference polypeptide can share similar functional characteristics (e.g., enzymatic activity, enzyme kinetics, substrate specificity or product specificity). In some instances, circular permutation may alter the secondary structure, tertiary structure or quaternary structure and produce an enzyme with different functional characteristics (e.g., increased or decreased enzymatic activity, different substrate specificity, or different product specificity). See, e.g., Yu and Lutz, Trends Biotechnol. 2011 January; 29(1):18-25.

[0066] It should be appreciated that in a protein that has undergone circular permutation, the linear amino acid sequence of the protein would differ from a reference protein that has not undergone circular permutation. However, one of ordinary skill in the art would be able to readily determine which residues in the protein that has undergone circular permutation correspond to residues in the reference protein that has not undergone circular permutation by, for example, aligning the sequences and detecting conserved motifs, and/or by comparing the structures or predicted structures of the proteins, e.g., by homology modeling. Variants described in this application include circularly permutated variants of sequences described in this application.

[0067] In some embodiments, an algorithm that determines the percent identity between a sequence of interest and a reference sequence described in this application accounts for the presence of circular permutation between the sequences. The presence of circular permutation may be detected using any method known in the art, including, for example, RASPODOM (Weiner et al., Bioinformatics. 2005 Apr. 1; 21(7):932-7). In some embodiments, the presence of circulation permutation is corrected for (e.g., the domains in at least one sequence are rearranged) prior to calculation of the percent identity between a sequence of interest and a sequence described in this application. The claims of this application should be understood to encompass sequences for which percent identity to a reference sequence is calculated after taking into account potential circular permutation of the sequence.

[0068] Functional variants of the recombinant REE-binding proteins described in this disclosure are also encompassed by the present disclosure. For example, functional variants may bind one or more of the same substrates or produce one or more of the same products. Functional variants may be identified using any method known in the art. For example, the algorithm of Karlin and Altschul Proc. Natl. Acad. Sci. USA 87:2264-68, 1990 described above may be used to identify homologous proteins with known functions.

[0069] Putative functional variants may also be identified by searching for polypeptides with functionally annotated domains. Databases including Pfam (Sonnhammer et al., Proteins. 1997 July; 28(3):405-20) may be used to identify polypeptides with a particular domain.

[0070] Homology modeling may also be used to identify amino acid residues that are amenable to mutation without affecting function. A non-limiting example of such a method may include use of position-specific scoring matrix (PSSM) and an energy minimization protocol.

[0071] Position-specific scoring matrix (PSSM) uses a position weight matrix to identify consensus sequences (e.g., motifs). PSSM can be conducted on nucleic acid or amino acid sequences. Sequences are aligned, and the method takes into account the observed frequency of a particular residue (e.g., an amino acid or a nucleotide) at a particular position and the number of sequences analyzed. See, e.g., Stormo et al., Nucleic Acids Res. 1982 May 11; 10(9):2997-3011. The likelihood of observing a particular residue at a given position can be calculated. Without being bound by a particular theory, positions in sequences with high variability may be amenable to mutation (e.g., PSSM score ≥0) to produce functional homologs.

[0072] PSSM may be paired with calculation of a Rosetta energy function, which determines the difference between the wild-type and the single-point mutant. The Rosetta energy function calculates this difference as (ΔΔG_{calc}). With the Rosetta function, the bonding interactions between a mutated residue and the surrounding atoms are used to determine whether a mutation increases or decreases protein stability. For example, a mutation that is designated as favorable by the PSSM score (e.g. PSSM score ≥0), can then be analyzed using the Rosetta energy function to determine the potential impact of the mutation on protein stability. Without being bound by a particular theory, potentially stabilizing mutations are desirable for protein engineering (e.g., production of functional homologs). In some embodiments, a potentially stabilizing mutation has a ΔΔG_{calc} value of less than −0.1 (e.g., less than −0.2, less than −0.3, less than −0.35, less than −0.4, less than −0.45, less than −0.5, less than −0.55, less than −0.6, less than −0.65, less than −0.7, less than −0.75, less than −0.8, less than −0.85, less than −0.9, less than −0.95, or less than −1.0) Rosetta energy units (R.e.u.). See, e.g., Goldenzweig et al., Mol Cell. 2016 Jul. 21; 63(2):337-346. Doi: 10.1016/j.molcel.2016.06.012.

[0073] In some embodiments, an REE-binding protein coding sequence comprises a mutation at 1, 2, 3, 4, 5, 6, 7, 8, 9, 10, 11, 12, 13, 14, 15, 16, 17, 18, 19, 20, 21, 22, 23, 24, 25, 26, 27, 28, 29, 30, 31, 32, 33, 34, 35, 36, 37, 38, 39, 40, 41, 42, 43, 44, 45, 46, 47, 48, 49, 50, 51, 52, 53, 54, 55, 56, 57, 58, 59, 60, 61, 62, 63, 64, 65, 66, 67, 68, 69, 70, 71, 72, 73, 74, 75, 76, 77, 78, 79, 80, 81, 82, 83, 84, 85, 86, 87, 88, 89, 90, 91, 92, 93, 94, 95, 96, 97, 98, 99, 100 or more than 100 positions corresponding to a reference (e.g., REE-binding protein) coding sequence. In some embodiments, an REE-binding protein coding sequence comprises a mutation at no more than 1, 2, 3, 4, 5, 6, 7, 8, 9, 10, 11, 12, 13, 14, 15, 16, 17, 18, 19, 20, 21, 22, 23, 24, 25, 26, 27, 28, 29, 30, 31, 32, 33, 34, 35, 36, 37, 38, 39, 40, 41, 42, 43, 44, 45, 46, 47, 48, 49, 50, 51, 52, 53, 54, 55, 56, 57, 58, 59, 60, 61, 62, 63, 64, 65, 66, 67, 68, 69, 70, 71, 72, 73, 74, 75, 76, 77, 78, 79, 80, 81, 82, 83, 84, 85, 86, 87, 88, 89, 90, 91, 92, 93, 94, 95, 96, 97, 98, 99, or 100 positions corresponding to a reference (e.g., REE-binding protein) coding sequence. In some embodiments, an REE-binding protein coding sequence comprises a mutation in 1, 2, 3, 4, 5, 6, 7, 8, 9, 10, 11, 12, 13, 14, 15, 16, 17, 18, 19, 20, 21, 22, 23, 24, 25, 26, 27, 28, 29, 30, 31, 32, 33, 34, 35, 36, 37, 38, 39, 40, 41, 42, 43, 44, 45, 46, 47, 48, 49, 50, 51, 52, 53, 54, 55, 56, 57, 58, 59, 60, 61, 62, 63, 64, 65, 66, 67, 68, 69, 70, 71, 72, 73, 74, 75, 76, 77, 78, 79, 80, 81, 82, 83, 84, 85, 86, 87, 88, 89, 90, 91, 92, 93, 94, 95, 96, 97, 98, 99, 100 or more codons of the coding sequence relative to a reference (e.g., REE-binding protein) coding sequence.

[0074] In some embodiments, an EF-hand domain sequence comprises a mutation at 1, 2, 3, 4, 5, 6, 7, 8, 9, 10, 11, 12, 13, 14, 15, 16, 17, 18, 19, 20, 21, 22, 23, 24, 25, 26, 27, 28, 29, or 30 positions corresponding to a reference EF-hand domain coding sequence. In some embodiments, an EF-hand domain sequence comprises a mutation at no more than 1, 2, 3, 4, 5, 6, 7, 8, 9, 10, 11, 12, 13, 14, 15, 16, 17, 18, 19, 20, 21, 22, 23, 24, 25, 26, 27, 28, 29, or 30 positions corresponding to a reference EF-hand domain coding sequence. In some embodiments, an EF-hand domain coding sequence comprises a mutation in 1, 2, 3, 4, 5, 6, 7, 8, 9, or 10 codons of the coding sequence relative to a reference EF-hand domain coding sequence. In some embodiments, a reference EF-hand domain coding sequence is selected from a EF-hand domain sequence in Table 2 (e.g., SEQ ID NOs: 300-977).

[0075] As will be understood by one of ordinary skill in the art, a mutation within a codon may or may not change the amino acid that is encoded by the codon due to degeneracy of the genetic code. In some embodiments, the one or more mutations in the coding sequence do not alter the amino acid sequence of the coding sequence (e.g., EF-hand domain or REE-binding protein) relative to the amino acid sequence of a reference polypeptide (e.g., a reference EF-hand domain or REE-binding protein).

[0076] In some embodiments, the one or more mutations in a recombinant EF-hand domain or REE-binding protein sequence alters the amino acid sequence of the peptide or polypeptide relative to the amino acid sequence of a reference polypeptide (e.g., EF-hand domain or REE-binding protein). In some embodiments, the one or more mutations alters the amino acid sequence of the recombinant REE-binding protein or EF-hand domain relative to the amino acid sequence of a reference REE-binding protein or EF-hand domain and alters (enhances or reduces) an activity of the REE-binding protein or EF-hand domain relative to the reference REE-binding protein or EF-hand domain.

[0077] The activity (e.g., specific activity) of any of the recombinant REE-binding proteins or EF-hand domains described in this disclosure may be measured using methods known to one of ordinary skill in the art. As a non-limiting example, a recombinant REE-binding protein or EF-hand domain's activity may be determined by measuring its substrate specificity and/or ability to bind one or more REEs.

[0078] The skilled artisan will also realize that mutations in a recombinant peptide or polypeptide (e.g., EF-hand domain or REE-binding protein) coding sequence may result in conservative amino acid substitutions to provide functionally equivalent variants of such a peptide or polypeptide, i.e., variants that retain the same or similar activity. As used in this disclosure, a “conservative amino acid substitution” refers to an amino acid substitution that does not alter the relative charge or size characteristics or functional activity of the protein in which the amino acid substitution is made.

[0079] In some instances, an amino acid is characterized by its R group (see, e.g., Table 1). For example, an amino acid may comprise a nonpolar aliphatic R group, a positively charged R group, a negatively charged R group, a nonpolar aromatic R group, or a polar uncharged R group. Non-limiting examples of an amino acid comprising a nonpolar aliphatic R group include alanine, glycine, valine, leucine, methionine, and isoleucine. Non-limiting examples of an amino acid comprising a positively charged R group includes lysine, arginine, and histidine. Non-limiting examples of an amino acid comprising a negatively charged R group include aspartate and glutamate. Non-limiting examples of an amino acid comprising a nonpolar, aromatic R group include phenylalanine, tyrosine, and tryptophan. Non-limiting examples of an amino acid comprising a polar uncharged R group include serine, threonine, cysteine, proline, asparagine, and glutamine.

[0080] Variants can be prepared according to methods for altering polypeptide sequence known to one of ordinary skill in the art such as are found in references which compile such methods, e.g., Molecular Cloning: A Laboratory Manual, J. Sambrook, et al., eds., Fourth Edition, Cold Spring Harbor Laboratory Press, Cold Spring Harbor, N.Y., 2012, or Current Protocols in Molecular Biology, F. M. Ausubel, et al., eds., John Wiley & Sons, Inc., New York, 2010.

[0081] Non-limiting examples of functionally equivalent variants of polypeptides may include conservative amino acid substitutions in the amino acid sequences of proteins disclosed in this application. As used in this disclosure “conservative substitution” is used interchangeably with “conservative amino acid substitution” and refers to any one of the amino acid substitutions provided in Table 1.

[0082] In some embodiments, 1, 2, 3, 4, 5, 6, 7, 8, 9, 10, 11, 12, 13, 14, 15, 16, 17, 18, 19, 20 or more than 20 residues can be changed when preparing variant polypeptides. In some embodiments, amino acids are replaced by conservative amino acid substitutions.

TABLE 1
Conservative Amino Acid Substitutions

| | | Conservative |
|---|---|---|
| Original | | Amino Acid |
| Residue | R Group Type | Substitutions |
| Ala | nonpolar aliphatic R group | Cys, Gly, Ser |
| Arg | positively charged R group | His, Lys |
| Asn | polar uncharged R group | Asp, Gln, Glu |
| Asp | negatively charged R group | Asn, Gln, Glu |
| Cys | polar uncharged R group | Ala, Ser |
| Gln | polar uncharged R group | Asn, Asp, Glu |
| Glu | negatively charged R group | Asn, Asp, Gin |
| Gly | nonpolar aliphatic R group | Ala, Ser |
| His | positively charged R group | Arg, Tyr, Trp |
| Ile | nonpolar aliphatic R group | Leu, Met, Val |
| Leu | nonpolar aliphatic R group | Ile, Met, Val |
| Lys | positively charged R group | Arg, His |
| Met | nonpolar aliphatic R group | Ile, Leu, Phe, Val |
| Pro | polar uncharged R group | |
| Phe | nonpolar aromatic R group | Met, Trp, Tyr |
| Ser | polar uncharged R group | Ala, Gly, Thr |
| Thr | polar uncharged R group | Ala, Asn, Ser |
| Trp | nonpolar aromatic R group | His, Phe, Tyr, Met |
| Tyr | nonpolar aromatic R group | His, Phe, Trp |
| Val | nonpolar aliphatic R group | Ile, Leu, Met, Thr |

[0083] Amino acid substitutions in the amino acid sequence of a peptide or polypeptide to produce a recombinant peptide or polypeptide (e.g., EF-hand domain or REE-binding protein) variant having a desired property and/or activity can be made by alteration of the coding sequence of the polypeptide (e.g., EF-hand domain or REE-binding protein). Similarly, conservative amino acid substitutions in the amino acid sequence of a polypeptide to produce functionally equivalent variants of the polypeptide typically are made by alteration of the coding sequence of the recombinant polypeptide (e.g., EF-hand domain or REE-binding protein).

[0084] Mutations (e.g., substitutions) can be made in a nucleotide sequence by any method known to one of ordinary skill in the art. For example, mutations can be made by PCR-directed mutation, site-directed mutagenesis according to the method of Kunkel (Kunkel, Proc. Nat. Acad. Sci. U.S.A. 82: 488-492, 1985), by chemical synthesis of a gene encoding a polypeptide, by gene editing techniques, or by insertions, such as insertion of a tag (e.g., a HIS tag or a GFP tag).

[0085] In some instances, the REE-binding protein is fused to an affinity tag, which may be useful in purification of the REE-binding protein. Non-limiting examples of affinity tags include albumin-binding protein (ABP), alkaline phosphatase (AP), chloramphenicol acetyl transferase (CAT), Glutathione S-transferase (GST), human influenza hemagglutinin (HA), maltose-binding protein (MBP), myc epitope, polyarginine (Arg-tag), polyhistidine (His-tag), biotin, streptavadin-binding peptide (SBP), streptavidin, and tandem Affinity Purification (TAP).

### Methods of Recovering REEs

[0086] Aspects of the present disclosure relate to the recombinant expression of genes encoding enzymes, functional modifications and variants thereof, as well as uses relating thereto. For example, the methods described in this disclosure may be used to recover an REE from a sample by contacting a sample with an REE-binding protein of the present disclosure. In some instances, host cells are used to secrete an REE-binding protein of interest and host cells are introduced into a sample of interest. In some embodiments, the REE-binding proteins are secreted from the host cells. The REE-binding protein may be further purified. In some embodiments, the REE-binding proteins of the present disclosure are used to bind an REE within a cell.

[0087] Samples may be of any source material. For example, samples include environmental samples from soil and waterways. In some embodiments, a sample is a stream sample, pond sample, soil sample, mine sample, river sample, mountain sample, or creek sample. In some embodiments, a sample is a synthetic sample comprising one or more metals. A sample can include any material in any location that comprises REEs. In some embodiments, a sample includes or is derived from machining waste. In some embodiments, a sample includes or is derived from electronic waste.

[0088] A nucleic acid encoding any of the recombinant polypeptides (e.g., REE-binding proteins) described in this disclosure may be incorporated into any appropriate vector through any method known in the art. For example, the vector may be an expression vector, including but not limited to a viral vector (e.g., a lentiviral, retroviral, adenoviral, or adeno-associated viral vector), any vector suitable for transient expression, any vector suitable for constitutive expression, or any vector suitable for inducible expression (e.g., a galactose-inducible vector (e.g., comprising a P_{gal} promoter) or doxycycline-inducible vector). In some instances, the vector is a lactose-inducible vector.

[0089] In some embodiments, a vector replicates autonomously in a cell. A vector can contain one or more endonuclease restriction sites that are cut by a restriction endonuclease to insert and ligate a nucleic acid containing a gene described in this disclosure to produce a recombinant vector that is able to replicate in a cell. Vectors are typically composed of DNA, although RNA vectors are also available. Cloning vectors include, but are not limited to: plasmids, fosmids, phagemids, virus genomes and artificial chromosomes. As used in this disclosure, the terms “expression vector” or “expression construct” refer to a nucleic acid construct, generated recombinantly or synthetically, with a series of specified nucleic acid elements that permit transcription of a particular nucleic acid in a host cell (e.g., microbe), such as a bacterial cell or a yeast cell. In some embodiments, the nucleic acid sequence of a gene described in this disclosure is inserted into a cloning vector such that it is operably joined to regulatory sequences and, in some embodiments, expressed as an RNA transcript. In some embodiments, the vector contains one or more markers, such as a selectable marker as described in this disclosure, to identify cells transformed or transfected with the recombinant vector. In some embodiments, the nucleic acid sequence of a gene described in this disclosure is codon-optimized. Codon-optimization of a sequence may increase production of a gene product by at least 10%, at least 15%, at least 20%, at least 25%, at least 30%, at least 35%, at least 40%, at least 45%, at least 50%, at least 55%, at least 60%, at least 65%, at least 70%, at least 75%, at least 80%, at least 85%, at least 90%, at least 95%, or 100%, including all values in between relative to a reference sequence that is not codon-optimized.

[0090] A coding sequence and a regulatory sequence are said to be “operably joined” or “operably linked” when the coding sequence and the regulatory sequence are covalently linked and the expression or transcription of the coding sequence is under the influence or control of the regulatory sequence. If the coding sequence is to be translated into a functional protein, the coding sequence and the regulatory sequence are said to be operably joined if induction of a promoter in the 5′ regulatory sequence permits the coding sequence to be transcribed and if the nature of the linkage between the coding sequence and the regulatory sequence does not (1) result in the introduction of a frame-shift mutation, (2) interfere with the ability of the promoter region to direct the transcription of the coding sequence, or (3) interfere with the ability of the corresponding RNA transcript to be translated into a protein.

[0091] In some embodiments, the nucleic acid encoding any of the proteins described in this disclosure is under the control of regulatory sequences (e.g., enhancer sequences). In some embodiments, a nucleic acid is expressed under the control of a promoter. The promoter can be a native promoter, e.g., the promoter of the gene in its endogenous context, which provides normal regulation of expression of the gene. Alternatively, a promoter can be a promoter that is different from the native promoter of the gene, e.g., the promoter is different from the promoter of the gene in its endogenous context.

[0092] In some embodiments, the promoter is a eukaryotic promoter. Non-limiting examples of eukaryotic promoters include TDH3, PGK1, PKC1, PDC1, TEF1, TEF2, RPL18B, SSA1, TDH2, PYK1, TPI1 GAL1, GAL10, GAL7, GAL3, GAL2, MET3, MET25, HXT3, HXT7, ACT1, ADH1, ADH2, CUP1-1, ENO2, and SOD1, as would be known to one of ordinary skill in the art (see, e.g., Addgene website: blog.addgene.org/plasmids-101-the-promoter-region).

[0093] In some embodiments, the promoter is a prokaryotic promoter (e.g., bacteriophage or bacterial promoter). Non-limiting examples of bacteriophage promoters include Pls1con, T3, T7, SP6, and PL. Non-limiting examples of bacterial promoters include apFAB101, apFAB92 (Ec-TTL-P100), abFAB71 (Ec-TTL-P097), apFAB45 (Ec-TTL-9092), apFAB29, apFAB76 (EC-TTL-P075), BBA_J23104 (Ec TTL-P054), J23104, Ec-TTL-P041, apFAB436 (Ec-TTL-P046), apFAB332, Pbad, PmgrB, Ptrc2, Plac/ara, Ptac, and Pm, as would be known to one of ordinary skill in the art.

[0094] In some embodiments, the promoter is an inducible promoter. As used in this disclosure, an “inducible promoter” is a promoter controlled by the presence or absence of a molecule. Non-limiting examples of inducible promoters include chemically regulated promoters and physically-regulated promoters. For chemically regulated promoters, the transcriptional activity can be regulated by one or more compounds, such as alcohol, tetracycline, galactose, a steroid, a metal, or other compounds. For physically regulated promoters, transcriptional activity can be regulated by a phenomenon such as light or temperature. Non-limiting examples of tetracycline-regulated promoters include anhydrotetracycline (aTc)-responsive promoters and other tetracycline-responsive promoter systems (e.g., a tetracycline repressor protein (tetR), a tetracycline operator sequence (tetO) and a tetracycline transactivator fusion protein (tTA)). Non-limiting examples of steroid-regulated promoters include promoters based on the rat glucocorticoid receptor, human estrogen receptor, moth ecdysone receptors, and promoters from the steroid/retinoid/thyroid receptor superfamily. Non-limiting examples of metal-regulated promoters include promoters derived from metallothionein (proteins that bind and sequester metal ions) genes. Non-limiting examples of pathogenesis-regulated promoters include promoters induced by salicylic acid, ethylene or benzothiadiazole (BTH). Non-limiting examples of temperature/heat-inducible promoters include heat shock promoters. Non-limiting examples of light-regulated promoters include light responsive promoters from plant cells. In certain embodiments, the inducible promoter is a galactose-inducible promoter. In some embodiments, the inducible promoter is induced by one or more physiological conditions (e.g., pH, temperature, radiation, osmotic pressure, saline gradients, cell surface binding, or concentration of one or more extrinsic or intrinsic inducing agents). Non-limiting examples of an extrinsic inducer or inducing agent include amino acids and amino acid analogs, saccharides and polysaccharides, nucleic acids, protein transcriptional activators and repressors, cytokines, toxins, petroleum-based compounds, metal containing compounds, salts, ions, enzyme substrate analogs, hormones or any combination thereof.

[0095] In some embodiments, the promoter is a constitutive promoter. As used in this disclosure, a “constitutive promoter” refers to an unregulated promoter that allows continuous transcription of a gene. Non-limiting examples of a constitutive promoter include TDH3, PGK1, PKC1, PDC1, TEF1, TEF2, RPL18B, SSA1, TDH2, PYK1, TPI1, HXT3, HXT7, ACT1, ADH1, ADH2, ENO2, and SOD1.

[0096] Other inducible promoters or constitutive promoters known to one of ordinary skill in the art are also contemplated in this disclosure.

[0097] The precise nature of the regulatory sequences needed for gene expression may vary between species or cell types, but generally include, as necessary, 5′ non-transcribed and 5′ non-translated sequences involved with the initiation of transcription and translation respectively, such as a TATA box, capping sequence, CAAT sequence, and the like. In particular, such 5′ non-transcribed regulatory sequences will include a promoter region which includes a promoter sequence for transcriptional control of the operably joined gene. Regulatory sequences may also include enhancer sequences or upstream activator sequences. The vectors disclosed in this application may include 5′ leader or signal sequences. The regulatory sequence may also include a terminator sequence. In some embodiments, a terminator sequence marks the end of a gene in DNA during transcription. The choice and design of one or more appropriate vectors suitable for inducing expression of one or more genes described in this disclosure in a heterologous organism is within the ability and discretion of one of ordinary skill in the art.

[0098] An expression vector encoding one or more REE-binding proteins may further encode a secretion signal peptide that promotes the export of the REE-binding protein out of a cell. Depending on the cell type, a prokaryotic or eukaryotic signal peptide may be used. Secretion signal peptides are often located at the amino-terminal end of a polypeptide sequence. Non-limiting examples of secretion signal peptides in bacteria include general secretion (Sec) and twin arginine translocation (Tat) signal peptides that promote export through the general secretion (Sec) export pathway or through the Tat export pathway, respectively. See, e.g., Freudl Microb Cell Fact. 2018; 17: 52; Lee et al., Annu Rev Microbiol. 2006; 60: 373-395. Sec and Tat signal peptides comprise a tripartite structure and have a positively charged n-region, a central hydrophobic h-region, and a polar c-region that harbors the recognition site (consensus: A-X-A) for signal peptidase. Tat signal peptides comprise an amino acid consensus motif (S/T-R-R-X-F-L-K, where X often is a polar amino acid residue). As a non-limiting example, the secretion signal from S. cerevisiae pre-pro-α-factor, which is the precursor to a peptide mating pheromone, may be used to secrete a REE-binding protein from yeast. See also, e.g., Fitzgerald and Glick, Microb Cell Fact. 2014; 13: 125.

[0099] Expression vectors containing the necessary elements for expression are commercially available and known to one of ordinary skill in the art (see, e.g., Sambrook et al., Molecular Cloning: A Laboratory Manual, Fourth Edition, Cold Spring Harbor Laboratory Press, 2012).

### Host Cells

[0100] Any of the proteins of the present disclosure may be expressed in a host cell. As used in this disclosure, a host cell is a cell that can be used to express at least one heterologous polynucleotide (e.g., encoding a protein or enzyme as described in this application).

[0101] The term “heterologous” with respect to a polynucleotide, such as a polynucleotide comprising a gene, is used interchangeably with the term “exogenous” and the term “recombinant” and refers to: a polynucleotide that has been artificially supplied to a biological system; a polynucleotide that has been modified within a biological system, or a polynucleotide whose expression or regulation has been manipulated within a biological system. A heterologous polynucleotide that is introduced into or expressed in a host cell may be a polynucleotide that comes from a different organism or species than the host cell, or may be a synthetic polynucleotide, or may be a polynucleotide that is also endogenously expressed in the same organism or species as the host cell. For example, a polynucleotide that is endogenously expressed in a host cell may be considered heterologous when it is situated non-naturally in the host cell; expressed recombinantly in the host cell, either stably or transiently; modified within the host cell; selectively edited within the host cell; expressed in a copy number that differs from the naturally occurring copy number within the host cell; or expressed in a non-natural way within the host cell, such as by manipulating regulatory regions that control expression of the polynucleotide. In some embodiments, a heterologous polynucleotide is a polynucleotide that is endogenously expressed in a host cell but whose expression is driven by a promoter that does not naturally regulate expression of the polynucleotide. In other embodiments, a heterologous polynucleotide is a polynucleotide that is endogenously expressed in a host cell and whose expression is driven by a promoter that does naturally regulate expression of the polynucleotide, but the promoter or another regulatory region is modified. In some embodiments, the promoter is recombinantly activated or repressed. For example, gene-editing based techniques may be used to regulate expression of a polynucleotide, including an endogenous polynucleotide, from a promoter, including an endogenous promoter. See, e.g., Chavez et al., Nat Methods. 2016 July; 13(7): 563-567. A heterologous polynucleotide may comprise a wild-type sequence or a mutant sequence as compared with a reference polynucleotide sequence.

[0102] Any suitable host cell may be used to produce any of the recombinant polypeptides (REE-binding proteins) disclosed in this application, including eukaryotic cells or prokaryotic cells. Suitable host cells include bacteria cells (e.g., Escherichia coli cells or Bacillus cells) and fungal cells (e.g., yeast cells). Non-limiting examples of genera of bacteria cells include Yersinia spp., Escherichia spp., Klebsiella spp., Agrobacterium spp., Acinetobacter spp., Bordetella spp., Neisseria spp., Aeromonas spp., Franciesella spp., Corynebacterium spp., Citrobacter spp., Chlamydia spp., Hemophilus spp., Brucella spp., Mycobacterium spp., Legionella spp., Lactococcus spp., Rhodococcus spp., Pseudomonas spp., Helicobacter spp., Salmonella spp., Vibrio spp., Bacillus spp., Erysipelothrix spp., Salmonella spp., Streptomyces spp., Bacteroides spp., Prevotella spp., Clostridium spp., Bifidobacterium spp., or Lactobacillus spp.

[0103] Non-limiting examples of genera of yeast for expression include Saccharomyces (e.g., S. cerevisiae), Pichia, Kluyveromyces (e.g., K. lactis), Hansenula and Yarrowia. In some embodiments, the yeast strain is an industrial polyploid yeast strain. Other non-limiting examples of fungal cells include cells obtained from Aspergillus spp., Penicillium spp., Fusarium spp., Rhizopus spp., Acremonium spp., Neurospora spp., Sordaria spp., Magnaporthe spp., Allomyces spp., Ustilago spp., Botrytis spp., and Trichoderma spp.

[0104] The term “cell,” as used in this disclosure, may refer to a single cell or a population of cells, such as a population of cells belonging to the same cell line or strain. Use of the singular term “cell” should not be construed to refer explicitly to a single cell rather than a population of cells.

[0105] The host cell may comprise genetic modifications relative to a wild-type counterpart. Reduction of gene expression and/or gene inactivation may be achieved through any suitable method, including but not limited to deletion of the gene, introduction of a point mutation into the endogenous gene, and/or truncation of the endogenous gene. For example, polymerase chain reaction (PCR)-based methods may be used (see, e.g., Gardner et al., Methods Mol Biol. 2014; 1205:45-78). As a non-limiting example, genes may be deleted through gene replacement (e.g., with a marker, including a selection marker). A gene may also be truncated through the use of a transposon system (see, e.g., Poussu et al., Nucleic Acids Res. 2005; 33(12): e104). Genes may also be modified through gene editing techniques known to one of ordinary skill in the art.

[0106] A vector encoding any of the recombinant polypeptides (e.g., REE-binding protein) described in this disclosure may be introduced into a suitable host cell using any method known in the art.

[0107] Non-limiting examples of bacteria transformation protocols are described in Hanahan Methods Enzymol. 1991; 204:63-113; Gerhardt, P. R., Murray, R. G. E., Wood, W. A. & Krieg, N. R. (editors) (1994). Methods for General and Molecular Bacteriology. Washington, D.C.: American Society for Microbiology; and Green, P. N. & Bousfield, I. J. (1982).

[0108] Non-limiting examples of yeast transformation protocols are described in Gietz et al., Yeast transformation can be conducted by the LiAc/SS Carrier DNA/PEG method. Methods Mol Biol. 2006; 313:107-20, which is hereby incorporated by reference in its entirety for this purpose.

[0109] Host cells may be cultured under any conditions suitable as would be understood by one of ordinary skill in the art. For example, any media, temperature, and incubation conditions known in the art may be used. For host cells carrying an inducible vector, cells may be cultured with an appropriate inducible agent to promote expression.

[0110] Any of the cells disclosed in this application can be cultured in media of any type (rich or minimal) and any composition prior to, during, and/or after contact and/or integration of a nucleic acid. The conditions of the culture or culturing process can be optimized through routine experimentation as would be understood by one of ordinary skill in the art. In some embodiments, the selected media is supplemented with various components. In some embodiments, the concentration and amount of a supplemental component is optimized. In some embodiments, other aspects of the media and growth conditions (e.g., pH, temperature, etc.) are optimized through routine experimentation. In some embodiments, the frequency that the media is supplemented with one or more supplemental components, and the amount of time that the cell is cultured, is optimized.

[0111] Culturing of the cells described in this disclosure can be performed in culture vessels known and used in the art. In some embodiments, an aerated reaction vessel (e.g., a stirred tank reactor) is used to culture the cells. In some embodiments, a bioreactor or fermenter is used to culture the cells. Thus, in some embodiments, the cells are used in fermentation. As used in this disclosure, the terms “bioreactor” and “fermenter” are interchangeably used and refer to an enclosure, or partial enclosure, in which a biological, biochemical and/or chemical reaction takes place, involving a living organism or part of a living organism. A “large-scale bioreactor” or “industrial-scale bioreactor” is a bioreactor that is used to generate a product on a commercial or quasi-commercial scale. Large scale bioreactors typically have volumes in the range of liters, hundreds of liters, thousands of liters, or more.

[0112] In some embodiments, a bioreactor comprises a cell (e.g., a bacteria cell or a yeast cell) or a cell culture (e.g., bacteria cell culture or yeast cell culture), such as a cell or cell culture described in this disclosure. In some embodiments, a bioreactor comprises a spore and/or a dormant cell type of an isolated microbe (e.g., a dormant cell in a dry state).

[0113] Non-limiting examples of bioreactors include: stirred tank fermenters, bioreactors agitated by rotating mixing devices, chemostats, bioreactors agitated by shaking devices, airlift fermenters, packed-bed reactors, fixed-bed reactors, fluidized bed bioreactors, bioreactors employing wave induced agitation, centrifugal bioreactors, roller bottles, and hollow fiber bioreactors, roller apparatuses (for example benchtop, cart-mounted, and/or automated varieties), vertically-stacked plates, spinner flasks, stirring or rocking flasks, shaken multi-well plates, MD bottles, T-flasks, Roux bottles, multiple-surface tissue culture propagators, modified fermenters, and coated beads (e.g., beads coated with serum proteins, nitrocellulose, or carboxymethyl cellulose to prevent cell attachment).

[0114] In some embodiments, the bioreactor includes a cell culture system where the cell (e.g., bacteria cell or yeast cell) is in contact with moving liquids and/or gas bubbles. In some embodiments, the cell or cell culture is grown in suspension. In other embodiments, the cell or cell culture is attached to a solid phase carrier. Non-limiting examples of a carrier system includes microcarriers (e.g., polymer spheres, microbeads, and microdisks that can be porous or non-porous), cross-linked beads (e.g., dextran) charged with specific chemical groups (e.g., tertiary amine groups), 2D microcarriers including cells trapped in nonporous polymer fibers, 3D carriers (e.g., carrier fibers, hollow fibers, multicartridge reactors, and semi-permeable membranes that can comprising porous fibers), microcarriers having reduced ion exchange capacity, encapsulation cells, capillaries, and aggregates. In some embodiments, carriers are fabricated from materials such as dextran, gelatin, glass, or cellulose.

[0115] In some embodiments, industrial-scale processes are operated in continuous, semi-continuous or non-continuous modes. Non-limiting examples of operation modes are batch, fed batch, extended batch, repetitive batch, draw/fill, rotating-wall, spinning flask, and/or perfusion mode of operation. In some embodiments, a bioreactor allows continuous or semi-continuous replenishment of the substrate stock, for example a carbohydrate source and/or continuous or semi-continuous separation of the product, from the bioreactor.

[0116] In some embodiments, the bioreactor or fermenter includes a sensor and/or a control system to measure and/or adjust reaction parameters. Non-limiting examples of reaction parameters include biological parameters (e.g., growth rate, cell size, cell number, cell density, cell type, or cell state, etc.), chemical parameters (e.g., pH, redox-potential, concentration of reaction substrate and/or product, concentration of dissolved gases, such as oxygen concentration and CO₂ concentration, nutrient concentrations, metabolite concentrations, concentration of an oligopeptide, concentration of an amino acid, concentration of a vitamin, concentration of a hormone, concentration of an additive, serum concentration, ionic strength, concentration of an ion, relative humidity, molarity, osmolarity, concentration of other chemicals, for example buffering agents, adjuvants, or reaction by-products), physical/mechanical parameters (e.g., density, conductivity, degree of agitation, pressure, and flow rate, shear stress, shear rate, viscosity, color, turbidity, light absorption, mixing rate, conversion rate, as well as thermodynamic parameters, such as temperature, light intensity/quality, etc.). Sensors to measure the parameters described in this disclosure are well known to one of ordinary skill in the relevant mechanical and electronic arts. Control systems to adjust the parameters in a bioreactor based on the inputs from a sensor described in this disclosure are well known to one of ordinary skill in the art in bioreactor engineering.

[0117] In some embodiments, the method involves batch fermentation (e.g., shake flask fermentation). General considerations for batch fermentation (e.g., shake flask fermentation) include the level of oxygen and glucose. For example, batch fermentation (e.g., shake flask fermentation) may be oxygen and glucose limited, so in some embodiments, the capability of a strain to perform in a well-designed fed-batch fermentation is underestimated. Also, the final product (e.g., an amino acid, including lysine) may display some differences from a naturally occurring product (e.g., an amino acid, including lysine) in terms of solubility, toxicity, chirality cellular accumulation and secretion and in some embodiments can have different fermentation kinetics.

[0118] In other embodiments, recovery of REEs may take place at a sample such as a mine or a waste stream, or in a processing center near a site such as a mine or waste stream. In some embodiments, REE-binding proteins, or cells containing REE-binding proteins, can be applied to a sample wherever the sample is located.

[0119] In some embodiments, the method comprises contacting a sample with a purified REE-binding protein to recover REEs. In some instances, host cells are engineered to produce recombinant REE-binding proteins, which may then been purified using methods known in the art. For example, REE-binding proteins comprising an affinity tag may be purified using affinity chromatography. Non-limiting examples of purification strategies include size exclusion chromatography, hydrophobic interaction chromatography, ion exchange chromatography, free-flow-electrophoresis, metal binding chromatography, immune-affinity chromatography, and high performance liquid chromatography.

[0120] In some embodiments, the methods further comprise purifying at least one REE that is bound to an REE-binding protein. In some instances, purifying an REE comprises extracting the REE. Non-limiting methods of REE purification include use of a metal chelator and treatment of an REE-bound REE-binding protein with denaturing conditions (e.g., altering the pH and/or temperature of the sample).

[0121] Further aspects of the disclosure relate to kits. Kits can include any REE-binding protein described in this disclosure and/or any protein comprising an EF-hand domain described in this disclosure. Kits may further comprise instructions for use of REE-binding proteins, such as use of an REE-binding protein for extraction of a rare earth element, such as lanthanide, scandium, or yttrium. The REE-binding protein for use in a kit may be an REE-binding protein that is expressed in, and secreted from, a cell. Kits may include cells for expressing REE-binding proteins and/or any materials necessary for producing cells or strains for expressing REE-binding proteins.

[0122] The present invention is further illustrated by the following Examples, which in no way should be construed as further limiting. The entire contents of all of the references (including literature references, issued patents, published patent applications, and co pending patent applications) cited throughout this application are hereby expressly incorporated by reference.

### EXAMPLES

### Example 1. Identification of Candidate Lanthanide-Binding Proteins

[0123] To identify candidate rare-earth element (REE)-binding proteins, environmental samples comprising microbes were collected from REE mines. The samples were analyzed to identify genes encoding proteins comprising an EF-hand domain, which has previously been characterized to bind calcium. Samples were analyzed by sequencing, including both 16S (genotype) sequencing, as well as full metagenomic sequencing.

[0124] To assemble short 100-150 bp long reads into longer “contigs,” the Megahit tool (Li et al., Bioinformatics. 2015 May 15; 31(10):1674-6) was used to generate a so-called “co-assembly” of all the reads in a given dataset. The resulting contigs were filtered for length to remove short sequences (<1000 bp) that are unlikely to encode complete domains. Transdecoder (Haas et al., Nat Protoc. 2013 August; 8(8):1494-512) was used to predict potential open reading frames in the remaining dataset. These predicted sequences were then compared to the PFAM domains described in Table 3.

[0125] As shown in FIG. 1, multiple EF-hand domain containing proteins were identified. Most of these proteins contained approximately two EF-hand domains, while some of the proteins contained more than five EF-hand domains. This phenomenon was observed across all four datasets. The “Tailings” sample contained significant amounts of Dysprosium and other lanthanides.

[0126] Candidate lanthanide-binding proteins comprising one or more EF-hand domains, identified from the sequence studies, were further characterized. An overview of the methods used to characterize the candidate lanthanide-binding proteins is provided in FIG. 2. As shown in FIG. 2, library proteins were expressed in E. coli BL21(DE3) cells, which express T7 RNA polymerase upon induction with lactose metabolites. Approximately 1600 EF-hand proteins were encoded into plasmids and placed under control of the T7 promoter, thereby allowing protein production to be controlled by media conditions. To alleviate potential concerns regarding cellular toxicity of metal-binding proteins, BL21(DE3) pLysS was selected for the primary screen. E. coli BL21(DE3) cells were transformed with plasmids containing EF-hand domain containing proteins. The resulting strains were grown in 96 deep-well plates in autoinduction media selected for maximal protein expression, then subsequently pelleted and stored frozen.

[0127] The EF-hand domain-containing proteins were purified with immobilized metal-ion affinity chromatography using a high-throughput 96-well plate-based purification protocol. The EF-hand domain containing proteins contained a polyhistidine ‘tag’ sequence, allowing the proteins to be purified by lysing the cells and separating the proteins through the selective and high-affinity binding of polyhistidine to Ni-NTA resin. Following separation from cellular debris, the purified proteins were removed from resin by eluting in imidazole buffer. Purified candidate lanthanide-binding proteins were used in all experimental assays.

[0128] In the primary screen, the entire protein library was screened for terbium (Tb)-binding using a competition assay between candidate proteins and the metal-binding colorimetric indicator Xylenol Orange (XO). FIG. 3 depicts the competition assay featuring the chromophore XO used in the primary screen. As shown in the left panel of FIG. 3, the chromophore XO exhibits an increase in absorption at 570 nm (Abs570) when complexed with Tb. In situations with weak Tb-binding proteins, the majority of Tb is bound to XO, leading to an increase in Abs570 (FIG. 3, top left). Strong Tb-binding proteins sequester the metal away from XO, which decreases Abs570 (FIG. 3, bottom left). The Tb affinity of 1461 candidate lanthanide-binding proteins was measured. The distribution of controls and lanthanide-binding proteins (LBPs) is shown in the pie chart in FIG. 3.

[0129] There were two biological replicates for a unique protein, and each protein was measured in triplicate. The screen contained three positive controls, one negative control, and buffer only sample blank. These controls were included on each of the 96-well assay plates to ensure experimental consistency and to normalize for any systematic differences between plates. Twenty percent of samples in the screen were controls. In total, the primary screen comprised over 10,809 samples on 114 96-well plates.

[0130] Data from the primary screen are shown in FIG. 4. To account for systematic differences between sample batches and plates, the Abs570 measurements were transformed to Z-scores by normalizing each value to the plate mean and standard deviation. Proteins with strong Tb-binding affinity are expected to sequester Tb ions away from XO, which will lead to a decrease in Abs570 and correspondingly negative Z-score. Indeed, there was a relative enrichment of samples with Z-scores 2 and 3 standard deviations below the mean, consistent with Tb-binding by candidate proteins (referred to sometimes as “strains”). These data confirmed that the primary screen identified Tb-binding proteins from experimental trials conducted on different days (corresponding to different batches). Overall, several hundred proteins displayed average Z-scores less than −1 (FIG. 4, bottom).

[0131] The primary screen hits—Tb-binding proteins—were selected for a secondary screen, which used a dialysis assay to directly measure Tb and dysprosium binding affinity and the selective binding of lanthanide metals over iron.

### Example 2. Characterization of Candidate Lanthanide-Binding Proteins

[0132] Out of the Tb-binding proteins identified in Example 1, 294 proteins were chosen for the secondary library, based on the criteria that selected strains must have 2+ replicates and Z-scores less than 1 standard deviation below the mean.

[0133] In developing a more sensitive secondary screen, an experimental approach was developed to measure metal binding directly. The secondary library was screened for Tb-binding using a dialysis-plate assay. For the dialysis assay, protein solutions were dialyzed overnight in 50× excess volume containing 2 μM Tb. After removing the protein solutions from the dialysis chamber their concentrations were measured by absorption at 280 nm (Abs280) then treated with Delfia reagents to sequester and concentrate Tb for quantitation by Delfia fluorescence assay. Fluorescence intensities were collected using a plate reader by measuring emission at 545 nm after excitation at 320 nm. Inset shows the 96-well dialysis plate setup.

[0134] In total, the screen contained 297 proteins, including the 294 candidate lanthanide-binding protein plus three positive controls. Sample buffer-only blanks were also screened (FIG. 5, left graph). Each protein was measured in triplicate. The measured intensity values are directly proportional to the Tb concentration in the protein solution, which will increase if a protein binds Tb. The values vary from slightly above background (FIG. 5, left-hand side of left graph) to substantially increased (right-hand side of left graph), indicating that many of the secondary screen library proteins bound Tb. To account for differences in protein expression levels between strains, the Tb binding data were normalized by protein concentration (FIG. 5, right graph), and proteins were selected with concentrations above 20 μM to focus on ones that express well and to minimize artifacts associated with normalization. See also Table 3. Many of the secondary library proteins had Tb affinities comparable to or better than the three positive controls, which included two engineered lanthanide-binding proteins and a natural protein with reported picomolar lanthanide binding affinity. These results confirmed the hits selected from the primary screen and provided a direct experimental metric to rank Tb-binding by library proteins.

[0135] To determine whether the discovered Tb-binding proteins also bind other lanthanides, identical dialysis-plate assays were conducted using dysprosium on the top 23 ‘best-binder’ proteins (FIG. 6, left). Consistent with their performance in the Tb experiments, the best binders also demonstrated high affinity for dysprosium; the majority of them outperformed the positive controls. Dialysis-plate assays using the transition metal iron were also performed on the best binders to assess their metal binding selectivity (FIG. 6, right). See also Table 3. In Table 3, the absence of a value indicates that the property was not measured.

[0136] It was also investigated whether the Tb-binding proteins also bind to iron. Iron was detected using a Ferrozine chromogenic assay kit commonly used to measure iron bound by proteins in biological samples. This assay involves denaturing the proteins to release bound iron, which can then form a strongly colorimetric complex with ferrozine. The assay can detect micromolar (or lower) metal concentrations. Most of the best-binder proteins did not bind iron at micromolar concentrations and, therefore, displayed selectivity for lanthanides over iron.

[0137] The primary and secondary screens revealed that proteins comprising a sequence selected from SEQ ID NOs: 1-179 are lanthanide-binding proteins. The secondary screen showed that proteins comprising a sequence selected from SEQ ID NOS: 4-71 have binding affinities that are comparable to or greater than control lanthanide binding proteins (SEQ ID NOs: 2-3). Binding levels of up to five times better than controls was observed.

[0138] The additional sensitivity of the secondary screen confirmed the lanthanide binding abilities of proteins identified in the primary screen and allowed for the comparison of lanthanide affinities to previously reported lanthanide binding proteins. In total, over 20 proteins that bind terbium and dysprosium metals better than previously described natural and designed lanthanide-binding proteins were identified. Moreover, most of the high affinity lanthanide-binding proteins identified in this disclosure did not bind iron at micromolar concentrations, indicating selectivity for lanthanides over iron.

### Sequences of Candidate Lanthanide-Binding Proteins

[0139] Table 2 provides the sequences of proteins described in Examples 1 and 2. In Table 2, the lanthanide (Ln)-binding affinity of each amino acid sequence is indicated. “Control” indicates a control Ln-binding protein (t347901 and/or t347902), “Best” indicates binding affinity comparable to or greater than strains t347901 and/or t347902, “hit” indicates binding affinity signal significantly above background, but less than t347901 and t347902, and “weak” indicates metal-binding signal similar to background level as detected in the assays. The initial primary screen was conducted on a library of 1,461 proteins and used t347901 and t347902 as control Ln-binding proteins. The top performing proteins from the primary screen (297 proteins) were advanced to the secondary screen. In addition to the t347901 and t347902 controls, t406938 was also included as a control protein in the secondary screen. The “best, “hit,” and “weak” designations were made based on the Terbium-binding assay conducted in the secondary screen. All proteins that advanced to the secondary screen tested positive for Tb-binding in the primary screen.

TABLE 2
Sequences

| | | | | | Number | |
|---|---|---|---|---|---|---|
| | Amino | | | | of EF- | Ln- |
| | Acid | Nucleotide | Position of EF- | EF-hand domain | hand | binding |
| Strain | Sequence | Sequence | hand domains | sequences | domains | Affinity |
| t406938 | (SEQ ID | (SEQ ID | (49, 61)(25, 37) | DPDKDGTLDAKEL | 4 | Control |
| | NO: 1) | NO: 978) | (98, 110)(74, 86) | (SEQ ID NO: 300) | | |
| | | | | DPDKDGTIDLKEA | | |
| | | | | (SEQ ID NO: 301) | | |
| | | | | NPDNDGTIDAREL | | |
| | | | | (SEQ ID NO: 302) | | |
| | | | | DPDNDGTLDKKEY | | |
| | | | | (SEQ ID NO: 303) | | |
| t347901 | (SEQ ID | (SEQ ID | | | 0 | Control |
| | NO: 2) | NO: 979) | | | | |
| t347902 | (SEQ ID | (SEQ ID | | | 0 | Control |
| | NO: 3) | NO: 980) | | | | |
| t349871 | (SEQ ID | (SEQ ID | (65,77)(91, 103) | DGNGDNMVSLQEF | 2 | Best |
| | NO: 4) | NO: 981) | | (SEQ ID NO: 304) | | |
| | | | | DANRDRRLSDDEY | | |
| | | | | (SEQ ID NO: 305) | | |
| t349865 | (SEQ ID | (SEQ ID | (47, 59)(173, | DTQGQGYLEKSDL | 3 | Best |
| | NO: 5) | NO: 982) | 185)(82, 94) | (SEQ ID NO: 306) | | |
| | | | | DTDGDGKVSFTEA | | |
| | | | | (SEQ ID NO: 307) | | |
| | | | | DADSDGKLTQTEL | | |
| | | | | (SEQ ID NO: 308) | | |
| t349953 | (SEQ ID | (SEQ ID | (122, 134)(66, | DADGDGVVTREEF | 3 | Best |
| | NO: 6) | NO: 983) | 78)(98, 110) | (SEQ ID NO: 309) | | |
| | | | | DADGDGYISFEEL | | |
| | | | | (SEQ ID NO: 310) | | |
| | | | | DSDGDGRVSVAEF | | |
| | | | | (SEQ ID NO: 311) | | |
| t349867 | (SEQ ID | (SEQ ID | (86, 98)(176, | DADSDGKLTQDEM | 3 | Best |
| | NO: 7) | NO: 984) | 188)(49,61) | (SEQ ID NO: 312) | | |
| | | | | DANGDGRVTASEA | | |
| | | | | (SEQ ID NO: 313) | | |
| | | | | DTSSKGYLEQADF | | |
| | | | | (SEQ ID NO: 314) | | |
| t350021 | (SEQ ID | (SEQ ID | (91, 103)(111, | DANGDGVITPDEA | 4 | Best |
| | NO: 8) | NO: 985) | 123)(135, 147) | (SEQ ID NO: 315) | | |
| | | | (67, 79) | DANGDGQITADEL | | |
| | | | | (SEQ ID NO: 316) | | |
| | | | | DANGDGVVTKEER | | |
| | | | | (SEQ ID NO: 317) | | |
| | | | | DTDKDGNISAEEA | | |
| | | | | (SEQ ID NO: 318) | | |
| t349910 | (SEQ ID | (SEQ ID | (66, 78)(43, 55) | DNNGDGIVNLGEA | 2 | Best |
| | NO: 9) | NO: 986) | | (SEQ ID NO: 319) | | |
| | | | | DSNADGVLSIEEA | | |
| | | | | (SEQ ID NO: 320) | | |
| t349766 | (SEQ ID | (SEQ ID | (13,25)(90, 102) | DKDSDGIISLEEF | 4 | Best |
| | NO: 10) | NO: 987) | (126, 138)(49, | (SEQ ID NO: 321) | | |
| | | | 61) | DKDGNGFISKEEL | | |
| | | | | (SEQ ID NO: 322) | | |
| | | | | DKDGNGEIDYEEF | | |
| | | | | (SEQ ID NO: 323) | | |
| | | | | DTDANGVIDFGEF | | |
| | | | | (SEQ ID NO: 324) | | |
| t349817 | (SEQ ID | (SEQ ID | (68, 80)(44, 56) | DADGDGAISSEEH | 2 | Best |
| | NO: 11) | NO: 988) | | (SEQ ID NO: 325) | | |
| | | | | DRNRDGKITRDEV | | |
| | | | | (SEQ ID NO: 326) | | |
| t349905 | (SEQ ID | (SEQ ID | (192, 204)(127, | DRDGDGVLSRQER | 6 | Best |
| | NO: 12) | 989) | 139)(157, 169) | (SEQ ID NO: 327) | | |
| | | | (227, 239)(260, | DTNGDGVVDEDER | | |
| | | | 272)(287, 299) | (SEQ ID NO: 328) | | |
| | | | | DSNGDGILDEAER | | |
| | | | | (SEQ ID NO: 329) | | |
| | | | | DQDGDGELNADEQ | | |
| | | | | (SEQ ID NO: 330) | | |
| | | | | SNGDGRINTTDL | | |
| | | | | (SEQ ID NO: 331) | | |
| | | | | DVNNDGVVDALDV | | |
| | | | | (SEQ ID NO: 332) | | |
| t350032 | (SEQ ID | (SEQ ID | (96, 108)(72, 84) | DADDDGKLVLNEF | 6 | Best |
| | NO: 13) | NO: 990) | (156, 168)(120, | (SEQ ID NO: 333) | | |
| | | | 132)(180, 192) | DTDGNAVLTVTEH | | |
| | | | (204, 216) | (SEQ ID NO: 334) | | |
| | | | | DANGDGIIDDDEC | | |
| | | | | (SEQ ID NO: 335) | | |
| | | | | DKDGDGALIAKEY | | |
| | | | | (SEQ ID NO: 336) | | |
| | | | | QNADGKITLDEF | | |
| | | | | (SEQ ID NO: 337) | | |
| | | | | DQNRDGFISIEEH | | |
| | | | | (SEQ ID NO: 338) | | |
| t349904 | (SEQ ID | (SEQ ID | (120, 132)(96, | DKDGDGALIAKEY | 6 | Best |
| | NO: 14) | NO: 991) | 108)(156, 168) | (SEQ ID NO: 339) | | |
| | | | (204, 216)(72, | DADDDGKLVLNEF | | |
| | | | 84)(180, 192) | (SEQ ID NO: 340) | | |
| | | | | DANGDGIIDDDEC | | |
| | | | | (SEQ ID NO: 341) | | |
| | | | | DQNRDGFISIEEH | | |
| | | | | (SEQ ID NO: 342) | | |
| | | | | TDGNAVLTVTEH | | |
| | | | | (SEQ ID NO: 343) | | |
| | | | | DQNADGKITLDEF | | |
| | | | | (SEQ ID NO: 344) | | |
| t349917 | (SEQ ID | (SEQ ID | (173, 185)(200, | DIDGDGQLTLFDF | 2 | Best |
| | NO: 15) | NO: 992) | 212) | (SEQ ID NO: 345) | | |
| | | | | DFDGDGSLTLFDF | | |
| | | | | (SEQ ID NO: 346) | | |
| t349989 | (SEQ ID | (SEQ ID | (31,43)(68, 80) | DADGNGTIDFPEF | 3 | Best |
| | NO: 16) | NO: 993) | (104, 116) | (SEQ ID NO: 347) | | |
| | | | | DKDGNGYISAAEL | | |
| | | | | (SEQ ID NO: 348) | | |
| | | | | DIDGDGQVNYEGK | | |
| | | | | (SEQ ID NO: 349) | | |
| t349986 | (SEQ ID | (SEQ ID | (72, 84)(97, 109) | DRNGDGKLSRDEL | 2 | Best |
| | NO: 17) | NO: 994) | | (SEQ ID NO: 350) | | |
| | | | | DTDDDGLLTREEV | | |
| | | | | (SEQ ID NO: 351) | | |
| t350040 | (SEQ ID | (SEQ ID | (488, 500)(168, | DFDGDGQLTLFDF | 5 | Best |
| | NO: 18) | NO: 995) | 180)(70, 82) | (SEQ ID NO: 352) | | |
| | | | (265, 277)(119, | DLDGDGDIDLALT | | |
| | | | 131) | (SEQ ID NO: 353) | | |
| | | | | DFDGNGIIDLAIV | | |
| | | | | (SEQ ID NO: 354) | | |
| | | | | DVNGDGHPDIITA | | |
| | | | | (SEQ ID NO: 355) | | |
| | | | | DLNGDGHADLVTA | | |
| | | | | (SEQ ID NO: 356) | | |
| t349942 | (SEQ ID | (SEQ ID | (358, 370)(103, | DRDNDGRIRVKDI | 3 | Best |
| | NO: 19) | NO: 996) | 115)(321,333) | (SEQ ID NO: 357) | | |
| | | | | DQEGVENLTYEEL | | |
| | | | | (SEQ ID NO: 358) | | |
| | | | | SKSNDEVITLEDL | | |
| | | | | (SEQ ID NO: 359) | | |
| t349798 | (SEQ ID | (SEQ ID | (132, 144) | KVDRNGFIDLEEL | 1 | Best |
| | NO: 20) | NO: 997) | | (SEQ ID NO: 360) | | |
| t349843 | (SEQ ID | (SEQ ID | (91, 103)(126, | DANADGVLDDAEL | 2 | Best |
| | NO: 21) | NO: 998) | 138) | (SEQ ID NO: 361) | | |
| | | | | DKNKDGKIDKQEA | | |
| | | | | (SEQ ID NO: 362) | | |
| t349820 | (SEQ ID | (SEQ ID | (42, 54)(66, 78) | DADQDGVVTVTEF | 2 | Best |
| | NO: 22) | NO: 999) | | (SEQ ID NO: 363) | | |
| | | | | DINEDGVVDREEM | | |
| | | | | (SEQ ID NO: 364) | | |
| t349761 | (SEQ ID | (SEQ ID | (80, 92) | DKDKDRVIDPEEI | 1 | Best |
| | NO: 23) | NO: 1000) | | (SEQ ID NO: 365) | | |
| t349957 | (SEQ ID | (SEQ ID | (362, 374)(338, | DTGKTRMLGQNEF | 4 | Best |
| | NO: 24) | NO: 1001) | 350)(296, 308) | (SEQ ID NO: 366) | | |
| | | | (272, 284) | DTDHDGKVSREEF | | |
| | | | | (SEQ ID NO: 367) | | |
| | | | | DADASGALDNKEF | | |
| | | | | (SEQ ID NO: 368) | | |
| | | | | DTNKDGMVSKAEW | | |
| | | | | (SEQ ID NO: 369) | | |
| t349887 | (SEQ ID | (SEQ ID | (376, 388)(339, | DTDKDGKILISDI | 2 | Best |
| | NO: 25) | NO: 1002) | 351) | (SEQ ID NO: 370) | | |
| | | | | CPDRDGSLTVDQL | | |
| | | | | (SEQ ID NO: 371) | | |
| t350029 | (SEQ ID | (SEQ ID | (84, 96)(164, | DSDQDGYHYRGGM | 3 | Best |
| | NO: 26) | NO: 1003) | 176)(140, 152) | (SEQ ID NO: 372) | | |
| | | | | DANKDGRLTPEEM | | |
| | | | | (SEQ ID NO: 373) | | |
| | | | | DADGDGKLSLQEF | | |
| | | | | (SEQ ID NO: 374) | | |
| t347905 | (SEQ ID | (SEQ ID | | | 0 | Best |
| | NO: 27) | NO: 1004) | | | | |
| t349915 | (SEQ ID | (SEQ ID | (532, 544)(504, | DLNSNGAVTRVEL | 2 | Best |
| | NO: 28) | NO: 1005) | 516) | (SEQ ID NO: 375) | | |
| | | | | DSDGSGALSIAEA | | |
| | | | | (SEQ ID NO: 376) | | |
| t349893 | (SEQ ID | (SEQ ID | (723, 735)(755, | DANNDGTVDFADL | 2 | Best |
| | NO: 29) | NO: 1006) | 767) | (SEQ ID NO: 377) | | |
| | | | | DVNNDGVVDFADL | | |
| | | | | (SEQ ID NO: 378) | | |
| t349889 | (SEQ ID | (SEQ ID | (807,819)(775, | DVNGDGVVNFTDL | 2 | Best |
| | NO: 30) | NO: 1007) | 787) | (SEQ ID NO: 379) | | |
| | | | | DLDGDGEIGFGDL | | |
| | | | | (SEQ ID NO: 380) | | |
| t349961 | (SEQ ID | (SEQ ID | (253, 265)(280, | DIDGDGSLTLFDF | 2 | Best |
| | NO: 31) | NO: 1008) | 292) | (SEQ ID NO: 381) | | |
| | | | | DFDGDGSLTLFDF | | |
| | | | | (SEQ ID NO: 382) | | |
| t349916 | (SEQ ID | (SEQ ID | (437, 449)(410, | DQNQNGVVDLIDF | 2 | Best |
| | NO: 32) | NO: 1009) | 422) | (SEQ ID NO: 383) | | |
| | | | | DLNGDKRVNLTDF | | |
| | | | | (SEQ ID NO: 384) | | |
| t349765 | (SEQ ID | (SEQ ID | (88, 100) | DLNKDGMLSTEEF | 1 | Best |
| | NO: 33) | NO: 1010) | | (SEQ ID NO: 385) | | |
| t349909 | (SEQ ID | (SEQ ID | (409, 421)(382, | DQNQNGTVDLIDF | 2 | Best |
| | NO: 34) | NO: 1011) | 394) | (SEQ ID NO: 386) | | |
| | | | | DLNKDGSVNLTDF | | |
| | | | | (SEQ ID NO: 387) | | |
| t349980 | (SEQ ID | (SEQ ID | (73, 85) | DENGDGELSREEL | 1 | Best |
| | NO: 35) | NO: 1012) | | (SEQ ID NO: 388) | | |
| t349928 | (SEQ ID | (SEQ ID | (691,703)(663, | DLNNDGVVNFADL | 3 | Best |
| | NO: 36) | NO: 1013) | 675)(370, 382) | (SEQ ID NO: 389) | | |
| | | | | DTNGDSQVNFTDL | | |
| | | | | (SEQ ID NO: 390) | | |
| | | | | DVNGDTNVNLQDL | | |
| | | | | (SEQ ID NO: 391) | | |
| t349764 | (SEQ ID | (SEQ ID | (134, 146) | DKNKDGKISGADF | 1 | Best |
| | NO: 37) | NO: 1014) | | (SEQ ID NO: 392) | | |
| t349937 | (SEQ ID | (SEQ ID | (73, 85)(97, 109) | DADKDGVITLEEF | 7 | Best |
| | NO: 38) | NO: 1015) | (129, 141)(153, | (SEQ ID NO: 393) | | |
| | | | 165)(224, 236) | DKNGDGAIDRAEF | | |
| | | | (256, 268)(280, | (SEQ ID NO: 394) | | |
| | | | 292) | DADGDGRIGKEEF | | |
| | | | | (SEQ ID NO: 395) | | |
| | | | | DVDGDGQIGLEDM | | |
| | | | | (SEQ ID NO: 396) | | |
| | | | | KNGDGFIDAKDL | | |
| | | | | (SEQ ID NO: 397) | | |
| | | | | DADGDGKVTKDEF | | |
| | | | | (SEQ ID NO: 398) | | |
| | | | | DIDGDGKITDADL | | |
| | | | | (SEQ ID NO: 399) | | |
| t349936 | (SEQ ID | (SEQ ID | (133, 145)(160, | DSDHDGKVSRDEF | 2 | Best |
| | NO: 39) | NO: 1016) | 172) | (SEQ ID NO: 400) | | |
| | | | | DADHDGFISEAEA | | |
| | | | | (SEQ ID NO: 401) | | |
| t49954 | (SEQ ID | (SEQ ID | (53, 65)(85, 97) | DKNADGKVCLDEF | 2 | Best |
| | NO: 40) | NO: 1017) | | (SEQ ID NO: 402) | | |
| | | | | DKDADGFLTLEEF | | |
| | | | | (SEQ ID NO: 403) | | |
| t349797 | (SEQ ID | (SEQ ID | (693,705)(721, | DTNGDNVVNFTDL | 2 | Best |
| | NO: 41) | NO: 1018) | 733) | (SEQ ID NO: 404) | | |
| | | | | DIDGSGTVDFTDL | | |
| | | | | (SEQ ID NO: 405) | | |
| t349931 | (SEQ ID | (SEQ ID | (531,543) | DTNNNGELSEAEL | 1 | Best |
| | NO: 42) | NO: 1019) | | (SEQ ID NO: 406) | | |
| t349866 | (SEQ ID | (SEQ ID | (240, 252)(203, | DSNGDGEIDASDR | 2 | Best |
| | NO: 43) | NO: 1020) | 215) | (SEQ ID NO: 407) | | |
| | | | | DLNQNGRVDGGRE | | |
| | | | | (SEQ ID NO: 408) | | |
| t350037 | (SEQ ID | (SEQ ID | (159, 171)(128, | DLDGNEQVDFYDL | 2 | Best |
| | NO: 44) | NO: 1021) | 140) | (SEQ ID NO: 409) | | |
| | | | | DIDGDGLVGFTDL | | |
| | | | | (SEQ ID NO: 410) | | |
| t349819 | (SEQ ID | (SEQ ID | (534, 546)(561, | DLDGDGVLTLFDF | 2 | Best |
| | NO: 45) | NO: 1022) | 573) | (SEQ ID NO: 411) | | |
| | | | | DFDGDGALTLFDF | | |
| | | | | (SEQ ID NO: 412) | | |
| t350030 | (SEQ ID | (SEQ ID | (65, 77)(37, 49) | DVNKDGVVDAADA | 2 | Best |
| | NO: 46) | NO: 1023) | | (SEQ ID NO: 413) | | |
| | | | | DINKDGKVDLEDA | | |
| | | | | (SEQ ID NO: 414) | | |
| t349933 | (SEQ ID | (SEQ ID | (262, 274) | DSNGDGQIDSNAL | 1 | Best |
| | NO: 47) | NO: 1024) | | (SEQ ID NO: 415) | | |
| t349939 | (SEQ ID | (SEQ ID | (499, 511)(533, | DKDNDGRVTRDEW | 2 | Best |
| | NO: 48) | NO: 1025) | 545) | (SEQ ID NO: 416) | | |
| | | | | DKNNDGAWTLDEI | | |
| | | | | (SEQ ID NO: 417) | | |
| t350035 | (SEQ ID | (SEQ ID | (370, 382)(402, | DLDYSGTVNFEDL | 2 | Best |
| | NO: 49) | NO: 1026) | 414) | (SEQ ID NO: 418) | | |
| | | | | DINKDGFVNFTDM | | |
| | | | | (SEQ ID NO: 419) | | |
| t349818 | (SEQ ID | (SEQ ID | (76, 88)(53, 65) | DGNQDGVISKADV | 2 | Best |
| | NO: 50) | NO: 1027) | | (SEQ ID NO: 420) | | |
| | | | | DANADGVLNASEA | | |
| | | | | (SEQ ID NO: 421) | | |
| t349835 | (SEQ ID | (SEQ ID | (126, 138) | DHNGDGKVSWNEY | 1 | Best |
| | NO: 51) | NO: 1028) | | (SEQ ID NO: 422) | | |
| t349981 | (SEQ ID | (SEQ ID | (80, 92)(56, 68) | DTSGDGNLDRAEL | 2 | Best |
| | NO: 52) | NO: 1029) | | (SEQ ID NO: 423) | | |
| | | | | DTDGNGMLSREEL | | |
| | | | | (SEQ ID NO: 424) | | |
| t349846 | (SEQ ID | (SEQ ID | (86, 98)(134, | DRNRDLKITRREM | 3 | Best |
| | NO: 53) | NO: 1030) | 146)(110, 122) | (SEQ ID NO: 425) | | |
| | | | | DLNRDQELTQAEF | | |
| | | | | (SEQ ID NO: 426) | | |
| | | | | DKDGNNLLTFEEW | | |
| | | | | (SEQ ID NO: 427) | | |
| t349944 | (SEQ ID | (SEQ ID | (221,233) | DLDGDGTIDLKEW | 1 | Best |
| | NO: 54) | NO: 1031) | | (SEQ ID NO: 428) | | |
| t349874 | (SEQ ID | (SEQ ID | (157, 169)(287, | DSNGDGILDEAER | 6 | Best |
| | NO: 55) | NO: 1032) | 299)(260, 272) | (SEQ ID NO: 429) | | |
| | | | (127, 139)(192, | DVNNDGVVDALDV | | |
| | | | 204)(227, 239) | (SEQ ID NO: 430) | | |
| | | | | DSNGDGRINTTDL | | |
| | | | | (SEQ ID NO: 431) | | |
| | | | | DTNGDGVVDEDER | | |
| | | | | (SEQ ID NO: 432) | | |
| | | | | RDGDGVLSRQER | | |
| | | | | (SEQ ID NO: 433) | | |
| | | | | DQDGDGELNADEQ | | |
| | | | | (SEQ ID NO: 434) | | |
| t350022 | (SEQ ID | (SEQ ID | (159, 171)(135, | DRNDDGAIDLEDA | 4 | Best |
| | NO: 56) | NO: 1033) | 147)(103, 115) | (SEQ ID NO: 435) | | |
| | | | (79,91) | DVDGDGQVTIDEF | | |
| | | | | (SEQ ID NO: 436) | | |
| | | | | DADGDGQLSLAEY | | |
| | | | | (SEQ ID NO: 437) | | |
| | | | | DADGDGKVTQAEV | | |
| | | | | (SEQ ID NO: 438) | | |
| t349979 | (SEQ ID | (SEQ ID | (109, 121)(83, | DRSRDGKLDREEF | 2 | Best |
| | NO: 57) | NO: 1034) | 95) | (SEQ ID NO: 439) | | |
| | | | | DRNKDGFVDKSES | | |
| | | | | (SEQ ID NO: 440) | | |
| t350009 | (SEQ ID | (SEQ ID | (553, 565) | DSDGDGHISQAEW | 1 | Best |
| | NO: 58) | NO: 1035) | | (SEQ ID NO: 441) | | |
| t349785 | (SEQ ID | (SEQ ID | (209, 221)(115, | DTNGDGAITNADG | 3 | Best |
| | NO: 59) | NO: 1036) | 127)(197, 209) | (SEQ ID NO: 442) | | |
| | | | | DYNRDGVVDGNER | | |
| | | | | (SEQ ID NO: 443) | | |
| | | | | DSDNDGTLDRRLD | | |
| | | | | (SEQ ID NO: 444) | | |
| t350004 | (SEQ ID | (SEQ ID | (216, 228) | DTNGDGVVNFSDL | 1 | Best |
| | NO: 60) | NO: 1037) | | (SEQ ID NO: 445) | | |
| t349914 | (SEQ ID | (SEQ ID | (947, 959)(972, | DLNRDGRLDPVEL | 2 | Best |
| | NO: 61) | NO: 1038) | 984) | (SEQ ID NO: 446) | | |
| | | | | DTNGDGVADVDEL | | |
| | | | | (SEQ ID NO: 447) | | |
| t349840 | (SEQ ID | (SEQ ID | (133, 145)(85, | DADGDERLTPREF | 3 | Best |
| | NO: 62) | NO: 1039) | 97)(109, 121) | (SEQ ID NO: 448) | | |
| | | | | DRNRDGIITRNEM | | |
| | | | | (SEQ ID NO: 449) | | |
| | | | | DVDGNNLLTFEEW | | |
| | | | | (SEQ ID NO: 450) | | |
| t350033 | (SEQ ID | (SEQ ID | (775,787)(741, | DINHSGTVNFNDF | 2 | Best |
| | NO: 63) | NO: 1040) | 753) | (SEQ ID NO: 451) | | |
| | | | | DLNGDGVVNIADL | | |
| | | | | (SEQ ID NO: 452) | | |
| t349804 | (SEQ ID | (SEQ ID | (142, 154)(262, | DRDADGILSDEEL | 2 | Best |
| | NO: 64) | NO: 1041) | 274) | (SEQ ID NO: 453) | | |
| | | | | DHDGRGSLTAAQL | | |
| | | | | (SEQ ID NO: 454) | | |
| t349913 | (SEQ ID | (SEQ ID | (225, 237) | DRDRDGEISLEEW | 1 | Best |
| | NO: 65) | NO: 1042) | | (SEQ ID NO: 455) | | |
| t349985 | (SEQ ID | (SEQ ID | (715,727)(746, | DTNGDGVVNFVDL | 2 | Best |
| | NO: 66) | NO: 1043) | 758) | (SEQ ID NO: 456) | | |
| | | | | DVDADGDVDFADL | | |
| | | | | (SEQ ID NO: 457) | | |
| t349872 | (SEQ ID | (SEQ ID | (46,58)(71,83) | DFNNDGRNETTSW | 3 | Best |
| | NO: 67) | NO: 1044) | (112, 124) | (SEQ ID NO: 458) | | |
| | | | | DRNGNGTIDAGRE | | |
| | | | | (SEQ ID NO: 459) | | |
| | | | | GGNGDGRINRRDA | | |
| | | | | (SEQ ID NO: 460) | | |
| t349778 | (SEQ ID | (SEQ ID | (73, 85) | DENGDGELSREEL | 1 | Best |
| | NO: 68) | NO: 1045) | | (SEQ ID NO: 461) | | |
| t349823 | (SEQ ID | (SEQ ID | (72, 84)(46, 58) | DADRDGLLSLEEF | 2 | Best |
| | NO: 69) | NO: 1046) | | (SEQ ID NO: 462) | | |
| | | | | DANGDGWVNRDEL | | |
| | | | | (SEQ ID NO: 463) | | |
| t349844 | (SEQ ID | (SEQ ID | (436, 448)(377, | DLDGDGLLDLVLG | 7 | Best |
| | NO: 70) | NO: 1047) | 389)(315, 327) | (SEQ ID NO: 464) | | |
| | | | (256, 268)(182, | DLDGDGDTDLLLA | | |
| | | | 194)(123, 135) | (SEQ ID NO: 465) | | |
| | | | (75, 87) | DIDGDGRLDLVMG | | |
| | | | | (SEQ ID NO: 466) | | |
| | | | | DIDGDGDLDLFWG | | |
| | | | | (SEQ ID NO: 467) | | |
| | | | | IDCNGRLDLFIG | | |
| | | | | (SEQ ID NO: 468) | | |
| | | | | DLNGDGRIDLLAE | | |
| | | | | (SEQ ID NO: 469) | | |
| | | | | DLDNSGRVDLFVQ | | |
| | | | | (SEQ ID NO: 470) | | |
| t349805 | (SEQ ID | (SEQ ID | (52, 64)(87, 99) | DKDADGKLSPEER | 3 | Best |
| | NO: 71) | NO: 1048) | (115, 127) | (SEQ ID NO: 471) | | |
| | | | | DADGNGELSPEER | | |
| | | | | (SEQ ID NO: 472) | | |
| | | | | DANKDGKLDPEER | | |
| | | | | (SEQ ID NO: 473) | | |
| t349853 | (SEQ ID | (SEQ ID | (221,233) | DLDGNGEIDIREW | 1 | hit |
| | NO: 72) | NO: 1049) | | (SEQ ID NO: 474) | | |
| t349828 | (SEQ ID | (SEQ ID | (86, 98) | DLNGDGTISVSEA | 1 | hit |
| | NO: 73) | NO: 1050) | | (SEQ ID NO: 475) | | |
| t350014 | (SEQ ID | (SEQ ID | (51,63)(77, 89) | DKNKDGMISKEEY | 2 | hit |
| | NO: 74) | NO: 1051) | | (SEQ ID NO: 476) | | |
| | | | | DLNGDGKLDKTEF | | |
| | | | | (SEQ ID NO: 477) | | |
| t350031 | (SEQ ID | (SEQ ID | (456, 468)(429, | DCDGDGELTLFDF | 2 | hit |
| | NO: 75) | NO: 1052) | 441) | (SEQ ID NO: 478) | | |
| | | | | DFDGDGELTLFDF | | |
| | | | | (SEQ ID NO: 479) | | |
| t349998 | (SEQ ID | (SEQ ID | (96, 108)(120, | DTDKSGDVSLEEF | 2 | hit |
| | NO: 76) | NO: 1053) | 132) | (SEQ ID NO: 480) | | |
| | | | | DANNDGKLTKDEI | | |
| | | | | (SEQ ID NO: 481) | | |
| t349808 | (SEQ ID | (SEQ ID | (494, 506)(450, | GGNGDGKISQQDA | 2 | hit |
| | NO: 77) | NO: 1054) | 462) | (SEQ ID NO: 482) | | |
| | | | | DRNNNGAIDSGRE | | |
| | | | | (SEQ ID NO: 483) | | |
| t349968 | (SEQ ID | (SEQ ID | (280, 292)(253, | DFDGDGSLTLFDF | 2 | hit |
| | NO: 78) | NO: 1055) | 265) | (SEQ ID NO: 484) | | |
| | | | | DIDGDGSLTLFDF | | |
| | | | | (SEQ ID NO: 485) | | |
| t349918 | (SEQ ID | (SEQ ID | (123, 135)(88, | DANKDGDIERSD- | 2 | hit |
| | NO: 79) | NO: 1056) | 100) | (SEQ ID NO: 486) | | |
| | | | | DRNEDGRVDRKER | | |
| | | | | (SEQ ID NO: 487) | | |
| t349786 | (SEQ ID | (SEQ ID | (61,73)(85,97) | DSDGDGKVSRREF | 2 | hit |
| | NO: 80) | NO: 1057) | | (SEQ ID NO: 488) | | |
| | | | | DLNNDRFLDADEI | | |
| | | | | (SEQ ID NO: 489) | | |
| t350007 | (SEQ ID | (SEQ ID | (89, 101) | DINHDGILTEEEF | 1 | hit |
| | NO: 81) | NO: 1058) | | (SEQ ID NO: 490) | | |
| t349949 | (SEQ ID | (SEQ ID | (135, 147)(102, | DPEGTGSLSESQF | 3 | hit |
| | NO: 82) | NO: 1059) | 114)(32, 44) | (SEQ ID NO: 491) | | |
| | | | | DADGDGSVTQAEY | | |
| | | | | (SEQ ID NO: 492) | | |
| | | | | DTNGDGVVSADEV | | |
| | | | | (SEQ ID NO: 493) | | |
| t349827 | (SEQ ID | (SEQ ID | (97, 109)(72, 84) | DTDDDGLLTREEV | 2 | hit |
| | NO: 83) | NO: 1060) | | (SEQ ID NO: 494) | | |
| | | | | DRNGDGKLSRDEL | | |
| | | | | (SEQ ID NO: 495) | | |
| t349930 | (SEQ ID | (SEQ ID | (127, 139)(103, | DANGDGVVTEVEI | 4 | hit |
| | NO: 84) | NO: 1061) | 115)(46,58)(70, | (SEQ ID NO: 496) | | |
| | | | 82) | DKDGDGRVSAREF | | |
| | | | | (SEQ ID NO: 497) | | |
| | | | | DGNGDGAVTRAEY | | |
| | | | | (SEQ ID NO: 498) | | |
| | | | | DRDGDGYVTQAEI | | |
| | | | | (SEQ ID NO: 499) | | |
| t349790 | (SEQ ID | (SEQ ID | (151, 163)(175, | DADGDGALSMQEF | 2 | hit |
| | NO: 85) | NO: 1062) | 187) | (SEQ ID NO: 500) | | |
| | | | | DGDDDGSLTMEEM | | |
| | | | | (SEQ ID NO: 501) | | |
| t349825 | (SEQ ID | (SEQ ID | (411,423)(441, | DTNGDGVVNFTDL | 2 | hit |
| | NO: 86) | NO: 1063) | 453) | (SEQ ID NO: 502) | | |
| | | | | DVNDDGVVDFSDL | | |
| | | | | (SEQ ID NO: 503) | | |
| t349795 | (SEQ ID | (SEQ ID | (93, 105) | DLNGSGKLSFDEL | 1 | hit |
| | NO: 87) | NO: 1064) | | (SEQ ID NO: 504) | | |
| t350011 | (SEQ ID | (SEQ ID | (26, 38)(59, 71) | DVDGDGEVTLMDV | 2 | hit |
| | NO: 88) | NO: 1065) | | (SEQ ID NO: 505) | | |
| | | | | DLNQDGVVDASDV | | |
| | | | | (SEQ ID NO: 506) | | |
| t349775 | (SEQ ID | (SEQ ID | (25, 37) | DADRDGTVNDEEI | 1 | hit |
| | NO: 89) | NO: 1066) | | (SEQ ID NO: 507) | | |
| t349935 | (SEQ ID | (SEQ ID | (271,283)(244, | DFDGDGSLTIFDF | 2 | hit |
| | NO: 90) | NO: 1067) | 256) | (SEQ ID NO: 508) | | |
| | | | | DIDGDGQLTIFDF | | |
| | | | | (SEQ ID NO: 509) | | |
| t350005 | (SEQ ID | (SEQ ID | (79, 91)(105, | DRDGDGKLSTAEA | 2 | hit |
| | NO: 91) | NO: 1068) | 117) | (SEQ ID NO: 510) | | |
| | | | | DKDGDGALSRTEF | | |
| | | | | (SEQ ID NO: 511) | | |
| t349934 | (SEQ ID | (SEQ ID | (85,97)(59,71) | DSNGDRTLVLEEF | 2 | hit |
| | NO: 92) | NO: 1069) | | (SEQ ID NO: 512) | | |
| | | | | DTDGSQSLSEEEA | | |
| | | | | (SEQ ID NO: 513) | | |
| t349964 | (SEQ ID | (SEQ ID | (131, 143)(185, | DLNADGRLDQVSM | 3 | hit |
| | NO: 93) | NO: 1070) | 197)(154, 166) | (SEQ ID NO: 514) | | |
| | | | | DDNGDGRIDASDA | | |
| | | | | (SEQ ID NO: 515) | | |
| | | | | DRNGNGRIDDGKE | | |
| | | | | (SEQ ID NO: 516) | | |
| t349958 | (SEQ ID | (SEQ ID | (153, 165)(180, | DIDGDGQLTLFDF | 2 | hit |
| | NO: 94) | NO: 1071) | 192) | (SEQ ID NO: 517) | | |
| | | | | DFDGDGQLTLFDF | | |
| | | | | (SEQ ID NO: 518) | | |
| t349888 | (SEQ ID | (SEQ ID | (60, 72)(225, | DLNGDGKLDVVVA | 3 | hit |
| | NO: 95) | NO: 1072) | 237)(323, 335) | (SEQ ID NO: 519) | | |
| | | | | DLNRDGKADIVAT | | |
| | | | | (SEQ ID NO: 520) | | |
| | | | | DLNNDGAIDLVTS | | |
| | | | | (SEQ ID NO: 521) | | |
| t349849 | (SEQ ID | (SEQ ID | (87, 99)(56, 68) | DLNGDGVVNFTDL | 2 | hit |
| | NO: 96) | NO: 1073) | | (SEQ ID NO: 522) | | |
| | | | | DTNGDGVVNFTDL | | |
| | | | | (SEQ ID NO: 523) | | |
| t349988 | (SEQ ID | (SEQ ID | (37, 49)(65, 77) | DVNNDGKVDAADV | 2 | hit |
| | NO: 97) | NO: 1074) | | (SEQ ID NO: 524) | | |
| | | | | DVNKDGKIDAADV | | |
| | | | | (SEQ ID NO: 525) | | |
| t349992 | (SEQ ID | (SEQ ID | (245, 257)(293, | DLDGDGKEEVIFA | 4 | hit |
| | NO: 98) | NO: 1075) | 305)(394, 406) | (SEQ ID NO: 526) | | |
| | | | (466, 478) | DLNKNGKPEIYVS | | |
| | | | | (SEQ ID NO: 527) | | |
| | | | | DLDNDGSREIIAI | | |
| | | | | (SEQ ID NO: 528) | | |
| | | | | DVNGDGQQDIIIN | | |
| | | | | (SEQ ID NO: 529) | | |
| t349822 | (SEQ ID | (SEQ ID | (212, 224)(102, | GLLADGELSVDEV | 2 | hit |
| | NO: 99) | NO: 1076) | 114) | (SEQ ID NO: 530) | | |
| | | | | DADRDGTLTVEEV | | |
| | | | | (SEQ ID NO: 531) | | |
| t349760 | (SEQ ID | (SEQ ID | (839, 851)(812, | DVNRDGVLNFADI | 2 | hit |
| | NO: 100) | NO: 1077) | 824) | (SEQ ID NO: 532) | | |
| | | | | DVNADGVVNAEDL | | |
| | | | | (SEQ ID NO: 533) | | |
| t349991 | (SEQ ID | (SEQ ID | (402, 414)(370, | DINKDGFVNFTDM | 2 | hit |
| | NO: 101) | NO: 1078) | 382) | (SEQ ID NO: 534) | | |
| | | | | DLDYSGTVNFEDL | | |
| | | | | (SEQ ID NO: 535) | | |
| t349890 | (SEQ ID | (SEQ ID | (131, 143) | PFNGDGYIDPEDV | 1 | hit |
| | NO: 102) | NO: 1079) | | (SEQ ID NO: 536) | | |
| t349959 | (SEQ ID | (SEQ ID | (243, 255) | DKNGDNYIPFFNS | 1 | hit |
| | NO: 103) | NO: 1080) | | (SEQ ID NO: 537) | | |
| t349877 | (SEQ ID | (SEQ ID | (137, 149)(113, | DADGDAKLTPAEF | 3 | hit |
| | NO: 104) | NO: 1081) | 125)(89, 101) | (SEQ ID NO: 538) | | |
| | | | | DTNGDNLLSFEEW | | |
| | | | | (SEQ ID NO: 539) | | |
| | | | | DRNRDGVITRIEM | | |
| | | | | (SEQ ID NO: 540) | | |
| t349892 | (SEQ ID | (SEQ ID | (24, 36)(44, 56) | DDDRDGVLSGKEL | 2 | hit |
| | NO: 105) | NO: 1082) | | (SEQ ID NO: 541) | | |
| | | | | DLNGNGLCERGEV | | |
| | | | | (SEQ ID NO: 542) | | |
| t349884 | (SEQ ID | (SEQ ID | (277, 289)(265, | DTNGDGKVTLADW | 2 | hit |
| | NO: 106) | NO: 1083) | 277) | (SEQ ID NO: 543) | | |
| | | | | DVNGDGKITNDID | | |
| | | | | (SEQ ID NO: 544) | | |
| t349955 | (SEQ ID | (SEQ ID | (365, 377)(392, | DINGDGVLNFFDV | 2 | hit |
| | NO: 107) | NO: 1084) | 404) | (SEQ ID NO: 545) | | |
| | | | | DFNGDGAFDFFDI | | |
| | | | | (SEQ ID NO: 546) | | |
| t350012 | (SEQ ID | (SEQ ID | (406,418) | DRDQDGSVSKTEF | 1 | hit |
| | NO: 108) | NO: 1085) | | (SEQ ID NO: 547) | | |
| t349770 | (SEQ ID | (SEQ ID | (99, ill)(125, | DQDKDGQISKGEA | 2 | hit |
| | NO: 109) | NO: 1086) | 137) | (SEQ ID NO: 548) | | |
| | | | | DTDRNGKISLIEW | | |
| | | | | (SEQ ID NO: 549) | | |
| t349847 | (SEQ ID | (SEQ ID | (426, 438) | DFDGDGALTLFDF | 1 | hit |
| | NO: 110) | NO: 1087) | | (SEQ ID NO: 550) | | |
| t349793 | (SEQ ID | (SEQ ID | (63, 75) | DVDGNGYIDYVGS | 1 | hit |
| | NO: 111) | NO: 1088) | | (SEQ ID NO: 551) | | |
| t349788 | (SEQ ID | (SEQ ID | (196, 208)(220, | DQNGDGKVDKTEY | 8 | hit |
| | NO: 112) | NO: 1089) | 232)(148, 160) | (SEQ ID NO: 552) | | |
| | | | (124, 136)(81, | DLDKNGELSSDEY | | |
| | | | 93)(263, 275) | (SEQ ID NO: 553) | | |
| | | | (287, 299)(57, | DTNKDGVISKADP | | |
| | | | 69) | (SEQ ID NO: 554) | | |
| | | | | DKNKSKTIGHDEY | | |
| | | | | (SEQ ID NO: 555) | | |
| | | | | ENKDGQVSVDEY | | |
| | | | | (SEQ ID NO: 556) | | |
| | | | | DTDNSQQISSAEF | | |
| | | | | (SEQ ID NO: 557) | | |
| | | | | DTDLNQQVTMAEA | | |
| | | | | (SEQ ID NO: 558) | | |
| | | | | DLDKDGTVSEAEF | | |
| | | | | (SEQ ID NO: 559) | | |
| t349956 | (SEQ ID | (SEQ ID | (705,717)(680, | DKNGDQLLTRDEL | 2 | hit |
| | NO: 113) | NO: 1090) | 692) | (SEQ ID NO: 560) | | |
| | | | | DRNGDGVVSKAEV | | |
| | | | | (SEQ ID NO: 561) | | |
| t350041 | (SEQ ID | (SEQ ID | (432, 444)(459, | DLDHDGVLTIFDY | 2 | hit |
| | NO: 114) | NO: 1091) | 471) | (SEQ ID NO: 562) | | |
| | | | | DFDGDGELTLFDF | | |
| | | | | (SEQ ID NO: 563) | | |
| t350000 | (SEQ ID | (SEQ ID | (145, 157)(168, | DADGDGELSAMEI | 4 | hit |
| | NO: 115) | NO: 1092) | 180)(220, 232) | (SEQ ID NO: 564) | | |
| | | | (244, 256) | DTNGDGKLSVDEL | | |
| | | | | (SEQ ID NO: 565) | | |
| | | | | DTNNDGFLSGDEI | | |
| | | | | (SEQ ID NO: 566) | | |
| | | | | DKDGDGKISKEEL | | |
| | | | | (SEQ ID NO: 567) | | |
| t349906 | (SEQ ID | (SEQ ID | (222, 234)(257, | DTNRDGELNGEEA | 6 | hit |
| | NO: 116) | NO: 1093) | 269)(124, 136) | (SEQ ID NO: 568) | | |
| | | | (53, 65)(172, | DGNGDGVFDEAEM | | |
| | | | 184)(88, 100) | (SEQ ID NO: 569) | | |
| | | | | DKDGDFRLSADEQ | | |
| | | | | (SEQ ID NO: 570) | | |
| | | | | DLNGDGVVDDEEA | | |
| | | | | (SEQ ID NO: 571) | | |
| | | | | ANGDGIVDEQEA | | |
| | | | | (SEQ ID NO: 572) | | |
| | | | | DANGDGNLDDEEQ | | |
| | | | | (SEQ ID NO: 573) | | |
| t349799 | (SEQ ID | (SEQ ID | (513,525)(543, | DKDGDGTLTRDEF | 2 | hit |
| | NO: 117) | NO: 1094) | 555) | (SEQ ID NO: 574) | | |
| | | | | DADKNGVLSRDEF | | |
| | | | | (SEQ ID NO: 575) | | |
| t349878 | (SEQ ID | (SEQ ID | (140, 152)(216, | DLDGDGMLSLSEF | 4 | hit |
| | NO: 118) | NO: 1095) | 228)(94, 106) | (SEQ ID NO: 576) | | |
| | | | (54, 66) | DTNQDGQISGDEL | | |
| | | | | (SEQ ID NO: 577) | | |
| | | | | DTDASGALDTAEV | | |
| | | | | (SEQ ID NO: 578) | | |
| | | | | DMDTDCSVSQSEF | | |
| | | | | (SEQ ID NO: 579) | | |
| t349922 | (SEQ ID | (SEQ ID | (553,565)(521, | DTDRDGQLTQDEF | 2 | hit |
| | NO: 119) | NO: 1096) | 533) | (SEQ ID NO: 580) | | |
| | | | | DQNHDGVLSHEEF | | |
| | | | | (SEQ ID NO: 581) | | |
| t350003 | (SEQ ID | (SEQ ID | (279, 291)(488, | DADHDGKVTLKEL | 2 | hit |
| | NO: 120) | NO: 1097) | 500) | (SEQ ID NO: 582) | | |
| | | | | DISGDGTVQMLYP | | |
| | | | | (SEQ ID NO: 583) | | |
| t349990 | (SEQ ID | (SEQ ID | (14, 26)(167, | IRANNQVISFAEY | 2 | hit |
| | NO: 121) | NO: 1098) | 179) | (SEQ ID NO: 584) | | |
| | | | | DADNSGTVDPDEI | | |
| | | | | (SEQ ID NO: 585) | | |
| t349950 | (SEQ ID | (SEQ ID | (99, 111)(75, 87) | DANGDGKLSLEEL | 4 | hit |
| | NO: 122) | NO: 1099) | (155, 167)(131, | (SEQ ID NO: 586) | | |
| | | | 143) | DADKDGKLSAAEM | | |
| | | | | (SEQ ID NO: 587) | | |
| | | | | DADGDGALSMEEM | | |
| | | | | (SEQ ID NO: 588) | | |
| | | | | DADGDGMLSAEEG | | |
| | | | | (SEQ ID NO: 589) | | |
| t349791 | (SEQ ID | (SEQ ID | (253, 265) | DRNRDGYVTGTEL | 1 | hit |
| | NO: 123) | NO: 1100) | | (SEQ ID NO: 590) | | |
| t347903 | (SEQ ID | (SEQ ID | | | 0 | hit |
| | NO: 124) | NO: 1101) | | | | |
| t349845 | (SEQ ID | (SEQ ID | (365, 377)(387, | DTNNDGRLTREEY | 2 | hit |
| | NO: 125) | NO: 1102) | 399) | (SEQ ID NO: 591) | | |
| | | | | DANRDGFATPEEV | | |
| | | | | (SEQ ID NO: 592) | | |
| t349812 | (SEQ ID | (SEQ ID | (405, 417)(378, | DLDGDGSLTLFDF | 2 | hit |
| | NO: 126) | NO: 1103) | 390) | (SEQ ID NO: 593) | | |
| | | | | DFDGDGTLTLFDF | | |
| | | | | (SEQ ID NO: 594) | | |
| t350036 | (SEQ ID | (SEQ ID | (139, 151)(112, | DSDASGTLTREEL( | 4 | hit |
| | NO: 127) | NO: 1104) | 124)(50, 62)(77, | SEQ ID NO: 595) | | |
| | | | 89) | DTNGDGVIDAGEA | | |
| | | | | (SEQ ID NO: 596) | | |
| | | | | DTDGDGAISLAEA | | |
| | | | | (SEQ ID NO: 597) | | |
| | | | | DADGDGLVTRAEM | | |
| | | | | (SEQ ID NO: 598) | | |
| t349908 | (SEQ ID | (SEQ ID | (166, 178)(68, | DRNGDGVLSPADF | 4 | hit |
| | NO: 128) | NO: 1105) | 80)(44, 56)(142, | (SEQ ID NO: 599) | | |
| | | | 154) | DADDNGAYSAEEL | | |
| | | | | (SEQ ID NO: 600) | | |
| | | | | DLDGDGAVTLAEA | | |
| | | | | (SEQ ID NO: 601) | | |
| | | | | DANHDGTVTRTEF | | |
| | | | | (SEQ ID NO: 602) | | |
| t349783 | (SEQ ID | (SEQ ID | (243, 255) | DKNGDNYIPFFNS | 1 | hit |
| | NO: 129) | NO: 1106) | | (SEQ ID NO: 603) | | |
| t349873 | (SEQ ID | (SEQ ID | (709, 721)(682, | DIDGDGHLTLFDF | 2 | hit |
| | NO: 130) | NO: 1107) | 694) | (SEQ ID NO: 604) | | |
| | | | | DLDGDATLTLYDM | | |
| | | | | (SEQ ID NO: 605) | | |
| t350006 | (SEQ ID | (SEQ ID | (733, 745)(760, | DINGDGLLNFFDI | 2 | hit |
| | NO: 131) | NO: 1108) | 772) | (SEQ ID NO: 606) | | |
| | | | | DFNNDGLFNFFDF | | |
| | | | | (SEQ ID NO: 607) | | |
| t349870 | (SEQ ID | (SEQ ID | | | 0 | hit |
| | NO: 132) | NO: 1109) | | | | |
| t349868 | (SEQ ID | (SEQ ID | (281,293) | DRNGNGTIDNGAE | 1 | hit |
| | NO: 133) | NO: 1110) | | (SEQ ID NO: 608) | | |
| t349839 | (SEQ ID | (SEQ ID | (121, 133)(165, | DANSDNALSKSEF | 2 | hit |
| | NO: 134) | NO: 1111) | 177) | (SEQ ID NO: 609) | | |
| | | | | DANKDGAVTPAEL | | |
| | | | | (SEQ ID NO: 610) | | |
| t349838 | (SEQ ID | (SEQ ID | (43, 55)(67, 79) | DSDGDGAVSKAEA | 5 | hit |
| | NO: 135) | NO: 1112) | (91, 103)(158, | (SEQ ID NO: 611) | | |
| | | | 170)(182, 194) | DVNKDGQINAADR | | |
| | | | | (SEQ ID NO: 612) | | |
| | | | | DTDKNGSISEAEF | | |
| | | | | (SEQ ID NO: 613) | | |
| | | | | DANGDKTITNAEM | | |
| | | | | (SEQ ID NO: 614) | | |
| | | | | SNKDGKISAEEH | | |
| | | | | (SEQ ID NO: 615) | | |
| t349898 | (SEQ ID | (SEQ ID | (63, 75)(17, 29) | DINGDGLMDFVTG | 3 | hit |
| | NO: 136) | NO: 1113) | (127, 139) | (SEQ ID NO: 616) | | |
| | | | | DGDGDNDVLSSSA | | |
| | | | | (SEQ ID NO: 617) | | |
| | | | | DVNGDGLLDIVTS | | |
| | | | | (SEQ ID NO: 618) | | |
| t350045 | (SEQ ID | (SEQ ID | (183, 195)(124, | DYDDNGVVSLAEL | 2 | hit |
| | NO: 137) | NO: 1114) | 136) | (SEQ ID NO: 619) | | |
| | | | | DVSGDGNLSTAEI | | |
| | | | | (SEQ ID NO: 620) | | |
| t349806 | (SEQ ID | (SEQ ID | (272, 284)(344, | DLDGDGIELTGYA | 3 | hit |
| | NO: 138) | NO: 1115) | 356)(313, 325) | (SEQ ID NO: 621) | | |
| | | | | DSNGDGRIDRLDK | | |
| | | | | (SEQ ID NO: 622) | | |
| | | | | DRNGNGIIDSGKE | | |
| | | | | (SEQ ID NO: 623) | | |
| t349842 | (SEQ ID | (SEQ ID | (149, 161)(119, | DADKSGGIDHNE | 2 | hit |
| | NO: 139) | NO: 1116) | 131) | W(SEQ ID NO: | | |
| | | | | 624) | | |
| | | | | DTNGDAQVVKEEF | | |
| | | | | (SEQ ID NO: 625) | | |
| t349824 | (SEQ ID | (SEQ ID | (85, 97)(50, 62) | DQNGDGELSAGEL | 2 | hit |
| | NO: 140) | NO: 1117) | | (SEQ ID NO: 626) | | |
| | | | | DQDGSNSVSESEY | | |
| | | | | (SEQ ID NO: 627) | | |
| t349857 | (SEQ ID | (SEQ ID | (146, 158)(74, | DSDASGSLSETEY | 4 | hit |
| | NO: 141) | NO: 1118) | 86)(95, 107) | (SEQ ID NO: 628) | | |
| | | | (120, 132) | DSDASGDLSEEEF | | |
| | | | | (SEQ ID NO: 629) | | |
| | | | | DSDGDGAVSEAEF | | |
| | | | | (SEQ ID NO: 630) | | |
| | | | | DTDGSGDLSEDEL | | |
| | | | | (SEQ ID NO: 631) | | |
| t347907 | (SEQ ID | (SEQ ID | | | 0 | hit |
| | NO: 142) | NO: 1119) | | | | |
| t349768 | (SEQ ID | (SEQ ID | (188, 200)(134, | DANRDGRLDAQDA | 3 | hit |
| | NO: 143) | NO: 1120) | 146)(157, 169) | (SEQ ID NO: 632) | | |
| | | | | DLNGDGRQTLTSM | | |
| | | | | (SEQ ID NO: 633) | | |
| | | | | DRNGNGRIDDGRE | | |
| | | | | (SEQ ID NO: 634) | | |
| t350034 | (SEQ ID | (SEQ ID | (121, 133)(183, | DADQDGKLAAEEM | 4 | hit |
| | NO: 144) | NO: 1121) | 195)(97, 109) | (SEQ ID NO: 635) | | |
| | | | (157, 169) | DDNADGAISKEEM | | |
| | | | | (SEQ ID NO: 636) | | |
| | | | | DADQNGQITKEEL | | |
| | | | | (SEQ ID NO: 637) | | |
| | | | | DADQDGFISPAEL | | |
| | | | | (SEQ ID NO: 638) | | |
| t349802 | (SEQ ID | (SEQ ID | (201,213) | DQDRSGKVDMQEW | 1 | hit |
| | NO: 145) | NO: 1122) | | (SEQ ID NO: 639) | | |
| t349941 | (SEQ ID | (SEQ ID | (213, 225)(180, | DVNNDGVIDLRDF | 3 | hit |
| | NO: 146) | NO: 1123) | 192)(86, 98) | (SEQ ID NO: 640) | | |
| | | | | DRDGDGRLDRWQG | | |
| | | | | (SEQ ID NO: 641) | | |
| | | | | DPDRSGAFGITDV | | |
| | | | | (SEQ ID NO: 642) | | |
| t349932 | (SEQ ID | (SEQ ID | (75, 87)(49, 61) | DANTDSQLSLDEY | 2 | hit |
| | NO: 147) | NO: 1124) | | (SEQ ID NO: 643) | | |
| | | | | DSNGDGMVSLEEF | | |
| | | | | (SEQ ID NO: 644) | | |
| t349869 | (SEQ ID | (SEQ ID | (468, 480) | DANGDGVINFADL | 1 | hit |
| | NO: 148) | NO: 1125) | | (SEQ ID NO: 645) | | |
| t349927 | (SEQ ID | (SEQ ID | (62, 74)(85, 97) | DANGDGSLDASEF | 2 | hit |
| | NO: 149) | NO: 1126) | | (SEQ ID NO: 646) | | |
| | | | | DKNGDGKVSQEEM | | |
| | | | | (SEQ ID NO: 647) | | |
| t350039 | (SEQ ID | (SEQ ID | (125, 137)(156, | DIDGNGLVDFSDL | 2 | hit |
| | NO: 150) | NO: 1127) | 168) | (SEQ ID NO: 648) | | |
| | | | | DLDGNEQVDFYDL | | |
| | | | | (SEQ ID NO: 649) | | |
| t349965 | (SEQ ID | (SEQ ID | (225, 237) | DANRDGEISLNEW | 1 | hit |
| | NO: 151) | NO: 1128) | | (SEQ ID NO: 650) | | |
| t349897 | (SEQ ID | (SEQ ID | (589, 601)(562, | DADRDGVVTPADI | 5 | hit |
| | NO: 152) | NO: 1129) | 574)(439, 451) | (SEQ ID NO: 651) | | |
| | | | (321, 333)(143, | DTDRNRRLDFFDI | | |
| | | | 155) | (SEQ ID NO: 652) | | |
| | | | | DFNNDGRVDMFAV | | |
| | | | | (SEQ ID NO: 653) | | |
| | | | | DLDGDGRLDWFMT | | |
| | | | | (SEQ ID NO: 654) | | |
| | | | | FDGDGYLDIYCV | | |
| | | | | (SEQ ID NO: 655) | | |
| t349767 | (SEQ ID | (SEQ ID | (100, 112)(127, | DGNRDGKVSREEL | 2 | hit |
| | NO: 153) | NO: 1130) | 139) | (SEQ ID NO: 656) | | |
| | | | | DADKDGTLTRDEM | | |
| | | | | (SEQ ID NO: 657) | | |
| t349999 | (SEQ ID | (SEQ ID | (96, 108)(120, | DTDKSGDVSLEEF | 2 | hit |
| | NO: 154) | NO: 1131) | 132) | (SEQ ID NO: 658) | | |
| | | | | DANNDGKLTKDEI | | |
| | | | | (SEQ ID NO: 659) | | |
| t349850 | (SEQ ID | (SEQ ID | (400, 412)(434, | DVNCDGKVNLVDF | 2 | hit |
| | NO: 155) | NO: 1132) | 446) | (SEQ ID NO: 660) | | |
| | | | | RLNNDGKVDLVDF | | |
| | | | | (SEQ ID NO: 661) | | |
| t349963 | (SEQ ID | (SEQ ID | (177, 189)(153, | DANKDGTVTPEER | 4 | hit |
| | NO: 156) | NO: 1133) | 165)(66, 78)(90, | (SEQ ID NO: 662) | | |
| | | | 102) | DTNKDGAVSRAEF | | |
| | | | | (SEQ ID NO: 663) | | |
| | | | | DVNKDGKLDQVDR | | |
| | | | | (SEQ ID NO: 664) | | |
| | | | | DTDGNGAISRDEF | | |
| | | | | (SEQ ID NO: 665) | | |
| t349891 | (SEQ ID | (SEQ ID | (448, 460)(405, | DQDRDGNLTPEEI | 3 | hit |
| | NO: 157) | NO: 1134) | 417)(539, 551) | (SEQ ID NO: 666) | | |
| | | | | DRNGDGQVSEEEF | | |
| | | | | (SEQ ID NO: 667) | | |
| | | | | DSNGDGFISPEEF | | |
| | | | | (SEQ ID NO: 668) | | |
| t349830 | (SEQ ID | (SEQ ID | (52, 64)(76, 88) | DTNGDKSISKDEH | 2 | hit |
| | NO: 158) | NO: 1135) | | (SEQ ID NO: 669) | | |
| | | | | DKNGDGVISHEEF | | |
| | | | | (SEQ ID NO: 670) | | |
| t349984 | (SEQ ID | (SEQ ID | (59,71) | DVDGNGYIDFCGS | 1 | hit |
| | NO: 159) | NO: 1136) | | (SEQ ID NO: 671) | | |
| t349848 | (SEQ ID | (SEQ ID | (216, 228) | DTDGDGKIDIDDL | 1 | hit |
| | NO: 160) | NO: 1137) | | (SEQ ID NO: 672) | | |
| t350016 | (SEQ ID | (SEQ ID | (276, 288)(300, | DSNGDGKLTRDEL | 2 | hit |
| | NO: 161) | NO: 1138) | 312) | (SEQ ID NO: 673) | | |
| | | | | DTNQDGAITVEEP | | |
| | | | | (SEQ ID NO: 674) | | |
| t349800 | (SEQ ID | (SEQ ID | (138, 150)(187, | DVDADGRLELTLE | 3 | hit |
| | NO: 162) | NO: 1139) | 199)(106, 118) | (SEQ ID NO: 675) | | |
| | | | | DDDDNNQVSYGEL | | |
| | | | | (SEQ ID NO: 676) | | |
| | | | | DKDGNGYISPQEY | | |
| | | | | (SEQ ID NO: 677) | | |
| t349836 | (SEQ ID | (SEQ ID | (847, 859)(818, | DVNNDGVVNFNDL | 2 | hit |
| | NO: 163) | NO: 1140) | 830) | (SEQ ID NO: 678) | | |
| | | | | DTNGDNVVNFTDL | | |
| | | | | (SEQ ID NO: 679) | | |
| t349860 | (SEQ ID | (SEQ ID | (93, 105)(168, | DKNRDGAIAKDEL | 4 | hit |
| | NO: 164) | NO: 1141) | 180)(254, 266) | (SEQ ID NO: 680) | | |
| | | | (230, 242) | DTNKDGSISREEF | | |
| | | | | (SEQ ID NO: 681) | | |
| | | | | DANKDGRVTAEER | | |
| | | | | (SEQ ID NO: 682) | | |
| | | | | DADKDGHITLAEA | | |
| | | | | (SEQ ID NO: 683) | | |
| t349982 | (SEQ ID | (SEQ ID | (172, 184)(267, | DRNKDGIIQTIVL | 2 | hit |
| | NO: 165) | NO: 1142) | 279) | (SEQ ID NO: 684) | | |
| | | | | DTNGNGRLDREDE | | |
| | | | | (SEQ ID NO: 685) | | |
| t349781 | (SEQ ID | (SEQ ID | (301,313)(328, | DVNGDGSLDLFDF | 2 | hit |
| | NO: 166) | NO: 1143) | 340) | (SEQ ID NO: 686) | | |
| | | | | DFDGDCSLTLFDF | | |
| | | | | (SEQ ID NO: 687) | | |
| t349826 | (SEQ ID | (SEQ ID | (109, 121) | DLDHSRFISKHEA | 1 | hit |
| | NO: 167) | NO: 1144) | | (SEQ ID NO: 688) | | |
| t349792 | (SEQ ID | (SEQ ID | (637, 649)(610, | DLDGDGAVSREEF | 2 | hit |
| | NO: 168) | NO: 1145) | 622) | (SEQ ID NO: 689) | | |
| | | | | DSDGDGTISAEEL | | |
| | | | | (SEQ ID NO: 690) | | |
| t349784 | (SEQ ID | (SEQ ID | (97, 109)(121, | DADGDGKVTPEEM | 3 | hit |
| | NO: 169) | NO: 1146) | 133)(153, 165) | (SEQ ID NO: 691) | | |
| | | | | DGDGDGSLSIAEF | | |
| | | | | (SEQ ID NO: 692) | | |
| | | | | DADGDGAVTAEEM | | |
| | | | | (SEQ ID NO: 693) | | |
| t350042 | (SEQ ID | (SEQ ID | (90, 102)(59, 71) | DTDGDGGITLREA | 2 | hit |
| | NO: 170) | NO: 1147) | | (SEQ ID NO: 694) | | |
| | | | | DYDGNGKLTANEL | | |
| | | | | (SEQ ID NO: 695) | | |
| t349894 | (SEQ ID | (SEQ ID | (221,233) | DLDGNGEIDVREW | 1 | hit |
| | NO: 171) | NO: 1148) | | (SEQ ID NO: 696) | | |
| t349809 | (SEQ ID | (SEQ ID | (45,57)(69,81) | DADGDGRVSLAEY | 3 | hit |
| | NO: 172) | NO: 1149) | (110, 122) | (SEQ ID NO: 697) | | |
| | | | | DRNGDGILQDGEL | | |
| | | | | (SEQ ID NO: 698) | | |
| | | | | DRDGDGHLDAAEL | | |
| | | | | (SEQ ID NO: 699) | | |
| t350017 | (SEQ ID | (SEQ ID | (202, 214)(152, | DTDGDYYLSQIEF | 2 | hit |
| | NO: 173) | NO: 1150) | 164) | (SEQ ID NO: 700) | | |
| | | | | DRNSDGRLSVAEY | | |
| | | | | (SEQ ID NO: 701) | | |
| t349929 | (SEQ ID | (SEQ ID | (46, 58)(175, | KYSKNGYMSRFQF | 2 | hit |
| | NO: 174) | NO: 1151) | 187) | (SEQ ID NO: 702) | | |
| | | | | DQDGDGALSFKEF | | |
| | | | | (SEQ ID NO: 703) | | |
| t349763 | (SEQ ID | (SEQ ID | (572, 584) | DRDGDGRVDGDEW | 1 | hit |
| | NO: 175) | NO: 1152) | | (SEQ ID NO: 704) | | |
| t349978 | (SEQ ID | (SEQ ID | (82, 94)(109, | DNDGDGRITSVGI | 4 | hit |
| | NO: 176) | NO: 1153) | 121)(59, 71)(35, | (SEQ ID NO: 705) | | |
| | | | 47) | DLDGDGYLSPAEA | | |
| | | | | (SEQ ID NO: 706) | | |
| | | | | DVNKDGVIDPDEF | | |
| | | | | (SEQ ID NO: 707) | | |
| | | | | DYDGDGRISRAEF | | |
| | | | | (SEQ ID NO: 708) | | |
| t349841 | (SEQ ID | (SEQ ID | (157, 169) | DRDNDGVLSLDEW | 1 | hit |
| | NO: 177) | NO: 1154) | | (SEQ ID NO: 709) | | |
| t349943 | (SEQ ID | (SEQ ID | (76, 88)(111, | DTDKSGTVTRVEI | 4 | hit |
| | NO: 178) | NO: 1155) | 123)(137, 149) | (SEQ ID NO: 710) | | |
| | | | (50, 62) | DTDNDGSLTREEA | | |
| | | | | (SEQ ID NO: 711) | | |
| | | | | DADKSGAVTGKEI | | |
| | | | | (SEQ ID NO: 712) | | |
| | | | | DKDNDGSLTREEA | | |
| | | | | (SEQ ID NO: 713) | | |
| t349864 | (SEQ ID | (SEQ ID | (417, 429)(390, | DCDEDGELTLFDF | 2 | hit |
| | NO: 179) | NO: 1156) | 402) | (SEQ ID NO: 714) | | |
| | | | | DIDGDGQLTIFDF | | |
| | | | | (SEQ ID NO: 715) | | |
| t349947 | (SEQ ID | (SEQ ID | (775, 787)(807, | DLDGDGEIGFGDL | 2 | Weak |
| | NO: 180) | NO: 1157) | 819) | (SEQ ID NO: 716) | | |
| | | | | DVNGDGVVNFTDL | | |
| | | | | (SEQ ID NO: 717) | | |
| t350025 | (SEQ ID | (SEQ ID | (516, 528)(242, | DADNDGKLELIQA | 2 | Weak |
| | NO: 181) | NO: 1158) | 254) | (SEQ ID NO: 718) | | |
| | | | | DINGDGRLETAIA | | |
| | | | | (SEQ ID NO: 719) | | |
| t349762 | (SEQ ID | (SEQ ID | (29, 41) | DINGDGTVSEEDL | 1 | Weak |
| | NO: 182) | NO: 1159) | | (SEQ ID NO: 720) | | |
| t349900 | (SEQ ID | (SEQ ID | (95, 107)(52, 64) | DKDKDGKLTELEL | 4 | Weak |
| | NO: 183) | NO: 1160) | (138, 150)(181, | (SEQ ID NO: 721) | | |
| | | | 193) | DANGDGYVSKKEF | | |
| | | | | (SEQ ID NO: 722) | | |
| | | | | DTNKDGMLSKQEL | | |
| | | | | (SEQ ID NO: 723) | | |
| | | | | DANGDGQISKEEF | | |
| | | | | (SEQ ID NO: 724) | | |
| t350013 | (SEQ ID | (SEQ ID | | | 0 | Weak |
| | NO: 184) | NO: 1161) | | | | |
| t350026 | (SEQ ID | (SEQ ID | (171, 183)(112, | DYDDNGVVSLSEL | 2 | Weak |
| | NO: 185) | NO: 1162) | 124) | (SEQ ID NO: 725) | | |
| | | | | DVSGDGNLSTAEI | | |
| | | | | (SEQ ID NO: 726) | | |
| t349861 | (SEQ ID | (SEQ ID | (72, 84)(96, 108) | DADADGRITQEEM | 4 | Weak |
| | NO: 186) | NO: 1163) | (132, 144)(157, | (SEQ ID NO: 727) | | |
| | | | 169) | DADGDGALSRDEL | | |
| | | | | (SEQ ID NO: 728) | | |
| | | | | DSDGDGKLSPDEM | | |
| | | | | (SEQ ID NO: 729) | | |
| | | | | DADGDGAITEAEF | | |
| | | | | (SEQ ID NO: 730) | | |
| t349852 | (SEQ ID | (SEQ ID | (244, 256)(167, | DLDGDGKLEVVVG | 2 | Weak |
| | NO: 187) | NO: 1164) | 179) | (SEQ ID NO: 731) | | |
| | | | | DGDGEEEVLISAA | | |
| | | | | (SEQ ID NO: 732) | | |
| t349919 | (SEQ ID | (SEQ ID | (225, 237) | DRDRDGEISLEEW | 1 | Weak |
| | NO: 188) | NO: 1165) | | (SEQ ID NO: 733) | | |
| t349811 | (SEQ ID | (SEQ ID | (381,393)(415, | DTDGDGRITSADL | 2 | Weak |
| | NO: 189) | NO: 1166) | 427) | (SEQ ID NO: 734) | | |
| | | | | DADKDGKVTSADL | | |
| | | | | (SEQ ID NO: 735) | | |
| t349772 | (SEQ ID | (SEQ ID | (167, 179) | DRNKNGRIDKEDF | 1 | Weak |
| | NO: 190) | NO: 1167) | | (SEQ ID NO: 736) | | |
| t350038 | (SEQ ID | (SEQ ID | (110, 122)(154, | DTDGNGSISKEEF | 4 | Weak |
| | NO: 191) | NO: 1168) | 166)(178, 190) | (SEQ ID NO: 737) | | |
| | | | (86, 98) | DTDNDGVITRAEF | | |
| | | | | (SEQ ID NO: 738) | | |
| | | | | DTDGDGTITDAER | | |
| | | | | (SEQ ID NO: 739) | | |
| | | | | DVNDDGQLDKADR | | |
| | | | | (SEQ ID NO: 740) | | |
| t350048 | (SEQ ID | (SEQ ID | (236, 248) | DSDGNGVLDDSEW | 1 | Weak |
| | NO: 192) | NO: 1169) | | (SEQ ID NO: 741) | | |
| t349854 | (SEQ ID | (SEQ ID | (74, 86)(40, 52) | IAGMDGQISEEDW | 2 | Weak |
| | NO: 193) | NO: 1170) | | (SEQ ID NO: 742) | | |
| | | | | DTNADGMISATEF | | |
| | | | | (SEQ ID NO: 743) | | |
| t349780 | (SEQ ID | (SEQ ID | (229, 241) | DRNGDGKIDLEEW | 1 | Weak |
| | NO: 194) | NO: 1171) | | (SEQ ID NO: 744) | | |
| t349814 | (SEQ ID | (SEQ ID | (236, 248) | DDNGNGALDPSEW | 1 | Weak |
| | NO: 195) | NO: 1172) | | (SEQ ID NO: 745) | | |
| t349803 | (SEQ ID | (SEQ ID | (685,697)(661, | DLDRDGSISRQEA | 2 | Weak |
| | NO: 196) | NO: 1173) | 673) | (SEQ ID NO: 746) | | |
| | | | | DTNGDGTLTPDEL | | |
| | | | | (SEQ ID NO: 747) | | |
| t349794 | (SEQ ID | (SEQ ID | (70, 82)(209, | DFDGDGSLTLFDF | 3 | Weak |
| | NO: 197) | NO: 1174) | 221)(43, 55) | (SEQ ID NO: 748) | | |
| | | | | DTNGNGELDAGDL | | |
| | | | | (SEQ ID NO: 749) | | |
| | | | | DLDGDGALTLFDF | | |
| | | | | (SEQ ID NO: 750) | | |
| t350008 | (SEQ ID | (SEQ ID | (66, 78)(102, | DKNADRMISLDEF | 3 | Weak |
| | NO: 198) | NO: 1175) | 114)(134, 146) | (SEQ ID NO: 751) | | |
| | | | | DSDRSGGLDTVEF | | |
| | | | | (SEQ ID NO: 752) | | |
| | | | | DSNHDKKLDFAEY | | |
| | | | | (SEQ ID NO: 753) | | |
| t349951 | (SEQ ID | (SEQ ID | (231,243) | DEDRDGNLDPQEW | 1 | Weak |
| | NO: 199) | NO: 1176) | | (SEQ ID NO: 754) | | |
| t349831 | (SEQ ID | (SEQ ID | (24, 36) | NKDNNGYLTPSEF | 1 | Weak |
| | NO: 200) | NO: 1177) | | (SEQ ID NO: 755) | | |
| t349946 | (SEQ ID | (SEQ ID | (483, 495)(506, | DRDGDGKVSSDEF | 2 | Weak |
| | NO: 201) | NO: 1178) | 518) | (SEQ ID NO: 756) | | |
| | | | | DRNRDGFISADEA | | |
| | | | | (SEQ ID NO: 757) | | |
| t349782 | (SEQ ID | (SEQ ID | (141, 153)(203, | DADGNGKLTRDEI | 4 | Weak |
| | NO: 202) | NO: 1179) | 215)(177, 189) | (SEQ ID NO: 758) | | |
| | | | (117, 129) | DRDGDGNVGTDEI | | |
| | | | | (SEQ ID NO: 759) | | |
| | | | | DADGDGAIGATEF | | |
| | | | | (SEQ ID NO: 760) | | |
| | | | | DADSNGAVSREEL | | |
| | | | | (SEQ ID NO: 761) | | |
| t350028 | (SEQ ID | (SEQ ID | (43, 55)(13, 25) | DRDCSGSISYTEL | 2 | Weak |
| | NO: 203) | NO: 1180) | | (SEQ ID NO: 762) | | |
| | | | | DKTKSGRIDVYGF | | |
| | | | | (SEQ ID NO: 763) | | |
| t349993 | (SEQ ID | (SEQ ID | (331,343) | DTDNNGLISLSEL | 1 | Weak |
| | NO: 204) | NO: 1181) | | (SEQ ID NO: 764) | | |
| t349970 | (SEQ ID | (SEQ ID | (81,93) | DTDQDGRITPLEL | 1 | Weak |
| | NO: 205) | NO: 1182) | | (SEQ ID NO: 765) | | |
| t349863 | (SEQ ID | (SEQ ID | (94, 106)(132, | DVNGDGVVDILDF | 2 | Weak |
| | NO: 206) | NO: 1183) | 144) | (SEQ ID NO: 766) | | |
| | | | | DLDGDGGKSTGQF | | |
| | | | | (SEQ ID NO: 767) | | |
| t349975 | (SEQ ID | (SEQ ID | (100, 112)(127, | DGNRDGKVSREEL | 2 | Weak |
| | NO: 207) | NO: 1184) | 139) | (SEQ ID NO: 768) | | |
| | | | | DADKDGTLTRDEM | | |
| | | | | (SEQ ID NO: 769) | | |
| t349926 | (SEQ ID | (SEQ ID | (46, 58)(70, 82) | DTNGDGNVSKAEF | 4 | Weak |
| | NO: 208) | NO: 1185) | (102, 114)(126, | (SEQ ID NO: 770) | | |
| | | | 138) | DADRSGSLTAAEF | | |
| | | | | (SEQ ID NO: 771) | | |
| | | | | DTDGNGVISQAEW | | |
| | | | | (SEQ ID NO: 772) | | |
| | | | | DKNSDGVLTSTER | | |
| | | | | (SEQ ID NO: 773) | | |
| t349810 | (SEQ ID | (SEQ ID | | | 0 | Weak |
| | NO: 209) | NO: 1186) | | | | |
| t350018 | (SEQ ID | (SEQ ID | (216, 228)(128, | DLNGDGVVSAEEM | 5 | Weak |
| | NO: 210) | NO: 1187) | 140)(89, 101) | (SEQ ID NO: 774) | | |
| | | | (66, 78)(151, | DADGDGKISRAES | | |
| | | | 163) | (SEQ ID NO: 775) | | |
| | | | | DTNGDGVVSPEEL | | |
| | | | | (SEQ ID NO: 776) | | |
| | | | | DGNGDGALSASEL | | |
| | | | | (SEQ ID NO: 777) | | |
| | | | | KDGDGFLTEDEL | | |
| | | | | (SEQ ID NO: 778) | | |
| t349896 | (SEQ ID | (SEQ ID | (236, 248) | DHDGDGALDNKEW | 1 | Weak |
| | NO: 211) | NO: 1188) | | (SEQ ID NO: 779) | | |
| t349966 | (SEQ ID | (SEQ ID | (67, 79)(88, 100) | DENKDGILEMKEV | 3 | Weak |
| | NO: 212) | NO: 1189) | (167, 179) | (SEQ ID NO: 780) | | |
| | | | | DRDGNGVIDNQEF | | |
| | | | | (SEQ ID NO: 781) | | |
| | | | | DMTHDNLLDHEEW | | |
| | | | | (SEQ ID NO: 782) | | |
| t349876 | (SEQ ID | (SEQ ID | (68, 80)(86, 98) | DKNHDGKVSIGER | 3 | Weak |
| | NO: 213) | NO: 1190) | (114, 126) | (SEQ ID NO: 783) | | |
| | | | | DRDKDGDVDFDDF | | |
| | | | | (SEQ ID NO: 784) | | |
| | | | | DTNGDGKVEFDEI | | |
| | | | | (SEQ ID NO: 785) | | |
| t349911 | (SEQ ID | (SEQ ID | (230, 242)(203, | DDDGDGTIDEEEC | 2 | Weak |
| | NO: 214) | NO: 1191) | 215) | (SEQ ID NO: 786) | | |
| | | | | DDDGDGMIDENCQ | | |
| | | | | (SEQ ID NO: 787) | | |
| t350023 | (SEQ ID | (SEQ ID | (105, 117)(134, | DTDGSGMIDRTEA | 2 | Weak |
| | NO: 215) | NO: 1192) | 146) | (SEQ ID NO: 788) | | |
| | | | | DPNGIGPDEFSQA | | |
| | | | | (SEQ ID NO: 789) | | |
| t349837 | (SEQ ID | (SEQ ID | (209, 221)(258, | DKNRDGFLTRAEM | 8 | Weak |
| | NO: 216) | NO: 1193) | 270)(235, 247) | (SEQ ID NO: 790) | | |
| | | | (186, 198)(154, | DANKDGRLSQEEF | | |
| | | | 166)(131, 143) | (SEQ ID NO: 791) | | |
| | | | (81,93)(58, 70) | DINGDGNISLQEW | | |
| | | | | (SEQ ID NO: 792) | | |
| | | | | DANNDGRVSRSEW | | |
| | | | | (SEQ ID NO: 793) | | |
| | | | | HDHNGWLSRGEF | | |
| | | | | (SEQ ID NO: 794) | | |
| | | | | DHNRDNRITRDEW | | |
| | | | | (SEQ ID NO: 795) | | |
| | | | | DWNRDGMLSGDEL | | |
| | | | | (SEQ ID NO: 796) | | |
| | | | | DTNHDGILQRSEW | | |
| | | | | (SEQ ID NO: 797) | | |
| t349923 | (SEQ ID | (SEQ ID | (74, 86)(131, | DRNGDGYFSKDDL | 4 | Weak |
| | NO: 217) | NO: 1194) | 143)(50, 62) | (SEQ ID NO: 798) | | |
| | | | (107, 119) | DSNRDNQVSKAEL | | |
| | | | | (SEQ ID NO: 799) | | |
| | | | | DRNGDGAVSRAEF | | |
| | | | | (SEQ ID NO: 800) | | |
| | | | | DKNRDGRISRAEF | | |
| | | | | (SEQ ID NO: 801) | | |
| t347906 | (SEQ ID | (SEQ ID | | | 0 | Weak |
| | NO: 218) | NO: 1195) | | | | |
| t349976 | (SEQ ID | (SEQ ID | (201,213)(228, | DLDGDGELTLFDF | 2 | Weak |
| | NO: 219) | NO: 1196) | 240) | (SEQ ID NO: 802) | | |
| | | | | DFDRDGDLTLFDF | | |
| | | | | (SEQ ID NO: 803) | | |
| t349883 | (SEQ ID | (SEQ ID | (22, 34)(94, 106) | DRDSDGKLEADDL | 3 | Weak |
| | NO: 220) | NO: 1197) | (130, 142) | (SEQ ID NO: 804) | | |
| | | | | DKEGKGMIPSGEL | | |
| | | | | (SEQ ID NO: 805) | | |
| | | | | DPTGSGTVDYEQF | | |
| | | | | (SEQ ID NO: 806) | | |
| t349886 | (SEQ ID | (SEQ ID | (182, 194)(108, | DRDGDGALTAADA | 6 | Weak |
| | NO: 221) | NO: 1198) | 120)(80, 92) | (SEQ ID NO: 807) | | |
| | | | (253, 265)(154, | DRNGDGHIDRQDR | | |
| | | | 166)(281, 293) | (SEQ ID NO: 808) | | |
| | | | | DTNQDRQVSAEEF | | |
| | | | | (SEQ ID NO: 809) | | |
| | | | | DVNKDGTVTFEEA | | |
| | | | | (SEQ ID NO: 810) | | |
| | | | | ADGDGRVTQAEV | | |
| | | | | (SEQ ID NO: 811) | | |
| | | | | DKNGDGVLTKADR | | |
| | | | | (SEQ ID NO: 812) | | |
| t349974 | (SEQ ID | (SEQ ID | (592, 604)(621, | DVNGDGVVNFTDL | 2 | Weak |
| | NO: 222) | NO: 1199) | 633) | (SEQ ID NO: 813) | | |
| | | | | DTDGDGDVDFEDL | | |
| | | | | (SEQ ID NO: 814) | | |
| t349813 | (SEQ ID | (SEQ ID | (82, 94)(50, 62) | DINRDGRIDSRDI | 2 | Weak |
| | NO: 223) | NO: 1200) | | (SEQ ID NO: 815) | | |
| | | | | DVNGDGVVDTYDL | | |
| | | | | (SEQ ID NO: 816) | | |
| t349969 | (SEQ ID | (SEQ ID | (107, 119) | DLDHSRFISKQEA | 1 | Weak |
| | NO: 224) | NO: 1201) | | (SEQ ID NO: 817) | | |
| t349759 | (SEQ ID | (SEQ ID | (205, 217)(129, | DSDSDGTVDNAEE | 2 | Weak |
| | NO: 225) | NO: 1202) | 141) | (SEQ ID NO: 818) | | |
| | | | | DLDQDGVVDANEL | | |
| | | | | (SEQ ID NO: 819) | | |
| t349862 | (SEQ ID | (SEQ ID | (153, 165)(72, | DANKDGVVTRDEM | 4 | Weak |
| | NO: 226) | NO: 1203) | 84)(177, 189) | (SEQ ID NO: 820) | | |
| | | | (96, 108) | DTNKDGKLDEADR | | |
| | | | | (SEQ ID NO: 821) | | |
| | | | | DANKDGKLTPEER | | |
| | | | | (SEQ ID NO: 822) | | |
| | | | | DANKDGNISRDEF | | |
| | | | | (SEQ ID NO: 823) | | |
| t349912 | (SEQ ID | (SEQ ID | (574, 586)(600, | DTNTDGKISREEA | 2 | Weak |
| | NO: 227) | NO: 1204) | 612) | (SEQ ID NO: 824) | | |
| | | | | DLNKDGFMDKGEL | | |
| | | | | (SEQ ID NO: 825) | | |
| t349774 | (SEQ ID | (SEQ ID | (245, 257) | KLNQSGFIDFEEL | 1 | Weak |
| | NO: 228) | NO: 1205) | | (SEQ ID NO: 826) | | |
| t349879 | (SEQ ID | (SEQ ID | (98, 110)(74, 86) | DKDRDGRLTPREF | 3 | Weak |
| | NO: 229) | NO: 1206) | (50, 62) | (SEQ ID NO: 827) | | |
| | | | | DADGNNLLTFEEW | | |
| | | | | (SEQ ID NO: 828) | | |
| | | | | DRNRDRLITRNEM | | |
| | | | | (SEQ ID NO: 829) | | |
| t349885 | (SEQ ID | (SEQ ID | (46, 58)(70, 82) | DINGDGVVSKEEF | 4 | Weak |
| | NO: 230) | NO: 1207) | (102, 114)(126, | (SEQ ID NO: 830) | | |
| | | | 138) | DADASGSVSQSEL | | |
| | | | | (SEQ ID NO: 831) | | |
| | | | | DADGNGAISEDEW | | |
| | | | | (SEQ ID NO: 832) | | |
| | | | | DKNKDGVLSADER | | |
| | | | | (SEQ ID NO: 833) | | |
| t349858 | (SEQ ID | (SEQ ID | (48, 60)(83, 95) | CPTGHLTVDEFKK | 3 | Weak |
| | NO: 231) | NO: 1208) | (119, 131) | (SEQ ID NO: 834) | | |
| | | | | DTNGDGTIDFREF | | |
| | | | | (SEQ ID NO: 835) | | |
| | | | | DLDGNGYISRSEM | | |
| | | | | (SEQ ID NO: 836) | | |
| t349987 | (SEQ ID | (SEQ ID | (98, 110)(122, | DRDRNDRISRVEL | 2 | Weak |
| | NO: 232) | NO: 1209) | 134) | (SEQ ID NO: 837) | | |
| | | | | DKDGNNLLTFEEW | | |
| | | | | (SEQ ID NO: 838) | | |
| t349977 | (SEQ ID | (SEQ ID | (568, 580)(539, | DLDLDGDVDFTDL | 2 | Weak |
| | NO: 233) | NO: 1210) | 551) | (SEQ ID NO: 839) | | |
| | | | | DVNNDGLVDFSDL | | |
| | | | | (SEQ ID NO: 840) | | |
| t349925 | (SEQ ID | (SEQ ID | (99, 111)(40, 52) | DRNGDGRLTAEEI | 4 | Weak |
| | NO: 234) | NO: 1211) | (16, 28)(75, 87) | (SEQ ID NO: 841) | | |
| | | | | DADRDGVLTRAEV | | |
| | | | | (SEQ ID NO: 842) | | |
| | | | | DTNGDGIVDRGEM | | |
| | | | | (SEQ ID NO: 843) | | |
| | | | | DTNRDGRVTRAEF | | |
| | | | | (SEQ ID NO: 844) | | |
| t349960 | (SEQ ID | (SEQ ID | (219, 231) | DLDGDGEIDLKEW | 1 | Weak |
| | NO: 235) | NO: 1212) | | (SEQ ID NO: 845) | | |
| t349995 | (SEQ ID | (SEQ ID | (426, 438)(453, | DLDHDGVLTIFDY | 2 | Weak |
| | NO: 236) | NO: 1213) | 465) | (SEQ ID NO: 846) | | |
| | | | | DFDGDGELTLFDF | | |
| | | | | (SEQ ID NO: 847) | | |
| t349920 | (SEQ ID | (SEQ ID | (130, 142)(104, | DKDKNGSLSRTEF | 2 | Weak |
| | NO: 237) | NO: 1214) | 116) | (SEQ ID NO: 848) | | |
| | | | | DANRDGQLSSAEA | | |
| | | | | (SEQ ID NO: 849) | | |
| t349997 | (SEQ ID | (SEQ ID | (141, 153)(202, | DTDGDGQLSRDEI | 3 | Weak |
| | NO: 238) | NO: 1215) | 214)(177, 189) | (SEQ ID NO: 850) | | |
| | | | | DADGNGAISPEEF | | |
| | | | | (SEQ ID NO: 851) | | |
| | | | | DGDGDGMVSIEEL | | |
| | | | | (SEQ ID NO: 852) | | |
| t349907 | (SEQ ID | (SEQ ID | (247, 259) | DVDKDGYLTGSEL | 1 | Weak |
| | NO: 239) | NO: 1216) | | (SEQ ID NO: 853) | | |
| t349771 | (SEQ ID | (SEQ ID | (539, 551)(568, | DVNNDGLVDFSDL | 2 | Weak |
| | NO: 240) | NO: 1217) | 580) | (SEQ ID NO: 854) | | |
| | | | | DLDLDGDVDFTDL | | |
| | | | | (SEQ ID NO: 855) | | |
| t349899 | (SEQ ID | (SEQ ID | (407, 419)(432, | DADGNGKVSRDEY | 4 | Weak |
| | NO: 241) | NO: 1218) | 444)(458, 470) | (SEQ ID NO: 856) | | |
| | | | (488, 500) | EKDGDGYISQDEF | | |
| | | | | (SEQ ID NO: 857) | | |
| | | | | NSSGSGKISLAEA | | |
| | | | | (SEQ ID NO: 858) | | |
| | | | | DKNHSGYVTWDEF | | |
| | | | | (SEQ ID NO: 859) | | |
| t349816 | (SEQ ID | (SEQ ID | (27, 39) | DLDGDGALSMFEL | 1 | Weak |
| | NO: 242) | NO: 1219) | | (SEQ ID NO: 860) | | |
| t349945 | (SEQ ID | (SEQ ID | (379, 391) | DKDGDGKITSNRE | 1 | Weak |
| | NO: 243) | NO: 1220) | | (SEQ ID NO: 861) | | |
| t349902 | (SEQ ID | (SEQ ID | (80, 92)(107, | DTNKDGKISKAEY | 2 | Weak |
| | NO: 244) | NO: 1221) | 119) | (SEQ ID NO: 862) | | |
| | | | | DTNKDGFISAAEM | | |
| | | | | (SEQ ID NO: 863) | | |
| t350027 | (SEQ ID | (SEQ ID | (236, 248) | DRDGDGVVSVAEF | 1 | Weak |
| | NO: 245) | NO: 1222) | | (SEQ ID NO: 864) | | |
| t349994 | (SEQ ID | (SEQ ID | (222, 234) | DTNGDNFVSLAEL | 1 | Weak |
| | NO: 246) | NO: 1223) | | (SEQ ID NO: 865) | | |
| t349938 | (SEQ ID | (SEQ ID | (130, 142) | DVDQNGNIDYSQL | 1 | Weak |
| | NO: 247) | NO: 1224) | | (SEQ ID NO: 866) | | |
| t349859 | (SEQ ID | (SEQ ID | (202, 214)(146, | DSDKDGVVTVAEM | 4 | Weak |
| | NO: 248) | NO: 1225) | 158)(110, 122) | (SEQ ID NO: 867) | | |
| | | | (178, 190) | DADRNGQLSAAEF | | |
| | | | | (SEQ ID NO: 868) | | |
| | | | | DGDKNGKVTRAEI | | |
| | | | | (SEQ ID NO: 869) | | |
| | | | | DTNKDGAVSLIEH | | |
| | | | | (SEQ ID NO: 870) | | |
| t349787 | (SEQ ID | (SEQ ID | (145, 157)(247, | DVNGDGVINFADL | 2 | Weak |
| | NO: 249) | NO: 1226) | 259) | (SEQ ID NO: 871) | | |
| | | | | DFDNDGVINFGDL | | |
| | | | | (SEQ ID NO: 872) | | |
| t350001 | (SEQ ID | (SEQ ID | (114, 126)(90, | DSDRDGRITTIEY | 2 | Weak |
| | NO: 250) | NO: 1227) | 102) | (SEQ ID NO: 873) | | |
| | | | | DSNRDGWLTLYEA | | |
| | | | | (SEQ ID NO: 874) | | |
| t349921 | (SEQ ID | (SEQ ID | | | 0 | Weak |
| | NO: 251) | NO: 1228) | | | | |
| t350019 | (SEQ ID | (SEQ ID | (107, 119)(72, | DKNGDGKLDDAER | 2 | Weak |
| | NO: 252) | NO: 1229) | 84) | (SEQ ID NO: 875) | | |
| | | | | DKDGDGKLSDAER | | |
| | | | | (SEQ ID NO: 876) | | |
| t350002 | (SEQ ID | (SEQ ID | (602,614)(626, | DADRNGQLTRDEF | 3 | Weak |
| | NO: 253) | NO: 1230) | 638)(111, 123) | (SEQ ID NO: 877) | | |
| | | | | DLSKTGQLTDEQL | | |
| | | | | (SEQ ID NO: 878) | | |
| | | | | DANQDGKLARDEF | | |
| | | | | (SEQ ID NO: 879) | | |
| t349832 | (SEQ ID | (SEQ ID | (169, 181)(766, | DANQDARLSEEEF | 3 | Weak |
| | NO: 254) | NO: 1231) | 778)(742, 754) | (SEQ ID NO: 880) | | |
| | | | | DTDETGVLTEQQL | | |
| | | | | (SEQ ID NO: 881) | | |
| | | | | DEDQDGQVTREEF | | |
| | | | | (SEQ ID NO: 882) | | |
| t347904 | (SEQ ID | (SEQ ID | | | 0 | Weak |
| | NO: 255) | NO: 1232) | | | | |
| t349971 | (SEQ ID | (SEQ ID | (152, 164)(55, | DLDGSGRVSVEEA | 2 | Weak |
| | NO: 256) | NO: 1233) | 67) | (SEQ ID NO: 883) | | |
| | | | | DRDGDGEVTDEGL | | |
| | | | | (SEQ ID NO: 884) | | |
| t349834 | (SEQ ID | (SEQ ID | (260, 272)(165, | DLNQDGVIDRSTE | 2 | Weak |
| | NO: 257) | NO: 1234) | 177) | (SEQ ID NO: 885) | | |
| | | | | DKNQDGIIQAVIL | | |
| | | | | (SEQ ID NO: 886) | | |
| t350024 | (SEQ ID | (SEQ ID | (527, 539)(606, | DASGDGKLDGDEL | 3 | Weak |
| | NO: 258) | NO: 1235) | 618)(630, 642) | (SEQ ID NO: 887) | | |
| | | | | DRNLDGQLAQPEL | | |
| | | | | (SEQ ID NO: 888) | | |
| | | | | DMDDDGRLNSMEF | | |
| | | | | (SEQ ID NO: 889) | | |
| t349856 | (SEQ ID | (SEQ ID | (107, 119)(74, | DVDRDGKIGLPEV | 2 | Weak |
| | NO: 259) | NO: 1236) | 86) | (SEQ ID NO: 890) | | |
| | | | | DFDGSGAADLADA | | |
| | | | | (SEQ ID NO: 891) | | |
| t349801 | (SEQ ID | (SEQ ID | (102, 114)(62, | DSNEDGYYSKAEA | 4 | Weak |
| | NO: 260) | NO: 1237) | 74)(31, 43)(139, | (SEQ ID NO: 892) | | |
| | | | 151) | DVDGDNRLSREEY | | |
| | | | | (SEQ ID NO: 893) | | |
| | | | | DRDGDGFITLQEG | | |
| | | | | (SEQ ID NO: 894) | | |
| | | | | DLDGNRVYDETEF | | |
| | | | | (SEQ ID NO: 895) | | |
| t349924 | (SEQ ID | (SEQ ID | (138, 150)(114, | DADKSGDLTRAEF | 3 | Weak |
| | NO: 261) | NO: 1238) | 126)(90, 102) | (SEQ ID NO: 896) | | |
| | | | | DKDGNNLLTFEEW | | |
| | | | | (SEQ ID NO: 897) | | |
| | | | | DRDRNDRISRVEM | | |
| | | | | (SEQ ID NO: 898) | | |
| t349851 | (SEQ ID | (SEQ ID | (129, 141)(105, | DADKNRALSPAEY | 3 | Weak |
| | NO: 262) | NO: 1239) | 117)(81,93) | (SEQ ID NO: 899) | | |
| | | | | DLNQDGKLSFEEW | | |
| | | | | (SEQ ID NO: 900) | | |
| | | | | DKDENGRITLAEL | | |
| | | | | (SEQ ID NO: 901) | | |
| t350047 | (SEQ ID | (SEQ ID | (265, 277) | DQDGNGKISPMEL | 1 | Weak |
| | NO: 263) | NO: 1240) | | (SEQ ID NO: 902) | | |
| t350044 | (SEQ ID | (SEQ ID | (86, 98)(76, 88) | DFDGDGDVDAADL | 2 | Weak |
| | NO: 264) | NO: 1241) | | (SEQ ID NO: 903) | | |
| | | | | DLDGDGRLDLDFD | | |
| | | | | (SEQ ID NO: 904) | | |
| t349777 | (SEQ ID | (SEQ ID | (268, 280)(107, | DKNGDGVVSISEA | 2 | Weak |
| | NO: 265) | NO: 1242) | 119) | (SEQ ID NO: 905) | | |
| | | | | KEDKKGRVTRREI | | |
| | | | | (SEQ ID NO: 906) | | |
| t349773 | (SEQ ID | (SEQ ID | (101, 113)(60, | DKDKDGSLSRAEA | 3 | Weak |
| | NO: 266) | NO: 1243) | 72)(125, 137) | (SEQ ID NO: 907) | | |
| | | | | DANKDGKISAEEF | | |
| | | | | (SEQ ID NO: 908) | | |
| | | | | DANNDGVLTLEEL | | |
| | | | | (SEQ ID NO: 909) | | |
| t349796 | (SEQ ID | (SEQ ID | (90, 102)(116, | DTNKNGRIEKDEY | 2 | Weak |
| | NO: 267) | NO: 1244) | 128) | (SEQ ID NO: 910) | | |
| | | | | NKGYCTFEEVAEG | | |
| | | | | (SEQ ID NO: 911) | | |
| t350010 | (SEQ ID | (SEQ ID | (131, 143) | DVDNDGLISIEDL | 1 | Weak |
| | NO: 268) | NO: 1245) | | (SEQ ID NO: 912) | | |
| t349962 | (SEQ ID | (SEQ ID | (255, 267) | DTDNDGKVDVAE | 1 | Weak |
| | NO: 269) | NO: 1246) | | L(SEQID NO: 913) | | |
| t349875 | (SEQ ID | (SEQ ID | (29, 41) | DVNNDGIISDEEL | 1 | Weak |
| | NO: 270) | NO: 1247) | | (SEQ ID NO: 914) | | |
| t349881 | (SEQ ID | (SEQ ID | (183, 195)(157, | DDNADGAISKEEM | 4 | Weak |
| | NO: 271) | NO: 1248) | 169)(121, 133) | (SEQ ID NO: 915) | | |
| | | | (97, 109) | DADQDGFISPAEL | | |
| | | | | (SEQ ID NO: 916) | | |
| | | | | DADQDGKLSAEEM | | |
| | | | | (SEQ ID NO: 917) | | |
| | | | | DADQNGQITKEEL | | |
| | | | | (SEQ ID NO: 918) | | |
| t349940 | (SEQ ID | (SEQ ID | (226, 238)(128, | DADKNGTVTMEER | 3 | Weak |
| | NO: 272) | NO: 1249) | 140)(152, 164) | (SEQ ID NO: 919) | | |
| | | | | DANKDGRVDAADR | | |
| | | | | (SEQ ID NO: 920) | | |
| | | | | DADRNGQISREEF | | |
| | | | | (SEQ ID NO: 921) | | |
| t349948 | (SEQ ID | (SEQ ID | (118, 130)(146, | DANKDGAITKEEY | 2 | Weak |
| | NO: 273) | NO: 1250) | 158) | (SEQ ID NO: 922) | | |
| | | | | DANSDGNLDKAEQ | | |
| | | | | (SEQ ID NO: 923) | | |
| t349882 | (SEQ ID | (SEQ ID | (235, 247)(140, | DRDADGLIQVSIQ | 4 | Weak |
| | NO: 274) | NO: 1251) | 152)(170, 182) | (SEQ ID NO: 924) | | |
| | | | (205, 217) | DSDTTGKLGFEEF | | |
| | | | | (SEQ ID NO: 925) | | |
| | | | | DRDQSGFLGSSQL | | |
| | | | | (SEQ ID NO: 926) | | |
| | | | | YAEEDGSMDFNNF | | |
| | | | | (SEQ ID NO: 927) | | |
| t349996 | (SEQ ID | (SEQ ID | (69, 81)(152, | DSNRDGFVSQAEA | 5 | Weak |
| | NO: 275) | NO: 1252) | 164)(110, 122) | (SEQ ID NO: 928) | | |
| | | | (198, 210)(222, | DKNRDSIITRAEF | | |
| | | | 234) | (SEQ ID NO: 929) | | |
| | | | | DANKDGSITRAEA | | |
| | | | | (SEQ ID NO: 930) | | |
| | | | | DANKDGRVSLAEA | | |
| | | | | (SEQ ID NO: 931) | | |
| | | | | LNRDGQVTPDER | | |
| | | | | (SEQ ID NO: 932) | | |
| t349967 | (SEQ ID | (SEQ ID | (100, 112)(127, | DTNGDGLISRAEA | 2 | Weak |
| | NO: 276) | NO: 1253) | 139) | (SEQ ID NO: 933) | | |
| | | | | DANKDGQLSREEM | | |
| | | | | (SEQ ID NO: 934) | | |
| t350046 | (SEQ ID | (SEQ ID | (211,223)(270, | DSDNNSRLTRAEI | 2 | Weak |
| | NO: 277) | NO: 1254) | 282) | (SEQ ID NO: 935) | | |
| | | | | DANTSGDLDYNEI | | |
| | | | | (SEQ ID NO: 936) | | |
| t349776 | (SEQ ID | (SEQ ID | (417, 429)(390, | DCDEDGELTLFDF | 2 | Weak |
| | NO: 278) | NO: 1255) | 402) | (SEQ ID NO: 937) | | |
| | | | | DIDGDGQLTIFDF | | |
| | | | | (SEQ ID NO: 938) | | |
| t349779 | (SEQ ID | (SEQ ID | (160, 172) | DVNRDGQITVGEI | 1 | Weak |
| | NO: 279) | NO: 1256) | | (SEQ ID NO: 939) | | |
| t350020 | (SEQ ID | (SEQ ID | (133, 145)(69, | DANRDGVITRAEI | 4 | Weak |
| | NO: 280) | NO: 1257) | 81)(94, 106) | (SEQ ID NO: 940) | | |
| | | | (157, 169) | DLNRDGKVTQAEF | | |
| | | | | (SEQ ID NO: 941) | | |
| | | | | DKNRDGQITRAEF | | |
| | | | | (SEQ ID NO: 942) | | |
| | | | | DADRDGILDRAEL | | |
| | | | | (SEQ ID NO: 943) | | |
| t349952 | (SEQ ID | (SEQ ID | (26, 38)(76, 88) | DRNQDGALDEEEF | 3 | Weak |
| | NO: 281) | NO: 1258) | (52, 64) | (SEQ ID NO: 944) | | |
| | | | | DANGDGRLDAEEI | | |
| | | | | (SEQ ID NO: 945) | | |
| | | | | DLDRNGRIDLDEL | | |
| | | | | (SEQ ID NO: 946) | | |
| t350015 | (SEQ ID | (SEQ ID | (127, 139)(100, | DADKDGTLTRDEM | 2 | Weak |
| | NO: 282) | NO: 1259) | 112) | (SEQ ID NO: 947) | | |
| | | | | DENRDGKVSRDEL | | |
| | | | | (SEQ ID NO: 948) | | |
| t349815 | (SEQ ID | (SEQ ID | (221,233) | DHDGNGEIDLDEW | 1 | Weak |
| | NO: 283) | NO: 1260) | | (SEQ ID NO: 949) | | |
| t349833 | (SEQ ID | (SEQ ID | (520, 532)(547, | DADGDGRVEARKR | 2 | Weak |
| | NO: 284) | NO: 1261) | 559) | (SEQ ID NO: 950) | | |
| | | | | DTNGDGLFDYRET | | |
| | | | | (SEQ ID NO: 951) | | |
| t350043 | (SEQ ID | (SEQ ID | (137, 149) | CPERDGRIDLDEF | 1 | Weak |
| | NO: 285) | NO: 1262) | | (SEQ ID NO: 952) | | |
| t349829 | (SEQ ID | (SEQ ID | (221,233) | DLDGNGELDLQEW | 1 | Weak |
| | NO: 286) | NO: 1263) | | (SEQ ID NO: 953) | | |
| t349769 | (SEQ ID | (SEQ ID | (70, 82)(94, 106) | DRNRDRVITRDEM | 3 | Weak |
| | NO: 287) | NO: 1264) | (118, 130) | (SEQ ID NO: 954) | | |
| | | | | DVDGNNLLTFEEW | | |
| | | | | (SEQ ID NO: 955) | | |
| | | | | DGNGDGRLTPREF | | |
| | | | | (SEQ ID NO: 956) | | |
| t349855 | (SEQ ID | (SEQ ID | (141, 153)(83, | DADADGRVTRGEL | 2 | Weak |
| | NO: 288) | NO: 1265) | 95) | (SEQ ID NO: 957) | | |
| | | | | DRDGDGRLSVDEL | | |
| | | | | (SEQ ID NO: 958) | | |
| t349903 | (SEQ ID | (SEQ ID | (75,87)(99, 111) | DADGDGMLSRAEI | 4 | Weak |
| | NO: 289) | NO: 1266) | (131, 143)(155, | (SEQ ID NO: 959) | | |
| | | | 167) | DTDGDGAVTEAEM | | |
| | | | | (SEQ ID NO: 960) | | |
| | | | | DANGDGRIDAGEM | | |
| | | | | (SEQ ID NO: 961) | | |
| | | | | DADGDGMVSRDEM | | |
| | | | | (SEQ ID NO: 962) | | |
| t349880 | (SEQ ID | (SEQ ID | (217, 229)(151, | DEDRDGFLTRADI | 6 | Weak |
| | NO: 290) | NO: 1267) | 163)(126, 138) | (SEQ ID NO: 963) | | |
| | | | (84, 96)(58, 70) | DLNRDGYLVASEV | | |
| | | | (190, 202) | (SEQ ID NO: 964) | | |
| | | | | DTDGDGRISKLEA | | |
| | | | | (SEQ ID NO: 965) | | |
| | | | | DKNGDGQLDAGER | | |
| | | | | (SEQ ID NO: 966) | | |
| | | | | ANQDGVIDRSEA | | |
| | | | | (SEQ ID NO: 967) | | |
| | | | | DTNADGRLDRAEV | | |
| | | | | (SEQ ID NO: 968) | | |
| t349901 | (SEQ ID | (SEQ ID | (106, 118)(45, | DGNGDGYLSRAEF | 3 | Weak |
| | NO: 291) | NO: 1268) | 57)(69,81) | (SEQ ID NO: 969) | | |
| | | | | DLDGDGRISLAEF | | |
| | | | | (SEQ ID NO: 970) | | |
| | | | | DLDGNDVLEPHEQ | | |
| | | | | (SEQ ID NO: 971) | | |
| t349895 | (SEQ ID | (SEQ ID | (58, 70) | DADGNGYIDYVGS | 1 | Weak |
| | NO: 292) | NO: 1269) | | (SEQ ID NO: 972) | | |
| t349789 | (SEQ ID | (SEQ ID | (58, 70) | DVDGNGYIDYVGS | 1 | Weak |
| | NO: 293) | NO: 1270) | | (SEQ ID NO: 973) | | |
| t349972 | (SEQ ID | (SEQ ID | (423, 435) | DLDGDGEIDMREW | 1 | Weak |
| | NO: 294) | NO: 1271) | | (SEQ ID NO: 974) | | |
| t349973 | (SEQ ID | (SEQ ID | (459, 471)(486, | DLDHDGVLTIFDY | 2 | Weak |
| | NO: 295) | NO: 1272) | 498) | (SEQ ID NO: 975) | | |
| | | | | DFDGDGELTLFDF | | |
| | | | | (SEQ ID NO: 976) | | |
| t349807 | (SEQ ID | (SEQ ID | (109, 121) | DKDQDGTISVRTT | 1 | Weak |
| | NO: 296) | NO: 1273) | | (SEQ ID NO: 977) | | |
| t339616 | (SEQ ID | (SEQ ID | | | 0 | Weak |
| | NO: 297) | NO: 1274) | | | | |
| TRFE_ | (SEQ ID | | | | 0 | Iron |
| HUMAN2 | NO: 298) | | | | | metal |
| | | | | | | binding |
| | | | | | | control |
| | | | | | | protein |
| TRFE_ | (SEQ ID | | | | 0 | Iron |
| BOVIN | NO: 299) | | | | | metal |
| 2 | | | | | | binding |
| | | | | | | control |
| | | | | | | protein |

TABLE 3
Results of metal-binding assays.

| | SEQ | | | | | | |
|---|---|---|---|---|---|---|---|
| | ID | | Tb_Intensity/ | | Dy_Intensity/ | | Fe_Intensity/ |
| Strain | NO: | Tb_Intensity | [Protein] | Dy_Intensity | [Protein] | Fe_Intensity | [Protein] |
| t406938 | 1 | 3293 | 28.9 | 1043 | 6.4 | | |
| t347901 | 2 | 1745 | 11.3 | 697 | 3.1 | 0.044 | 2.01E−05 |
| t347902 | 3 | 1593 | 11.3 | 601 | 2.7 | 0.044 | 3.29E−05 |
| t349871 | 4 | 1672 | 43.7 | 587 | 6.0 | 0.044 | 8.23E−05 |
| t349865 | 5 | 4045 | 43.8 | 1097 | 8.4 | 0.044 | 2.96E−05 |
| t349953 | 6 | 2016 | 39.0 | 855 | 12.7 | 0.044 | 7.66E−05 |
| t349867 | 7 | 2404 | 81.3 | 824 | 18.8 | 0.044 | 1.19E−04 |
| t350021 | 8 | 2544 | 16.3 | 773 | 3.8 | | |
| t349910 | 9 | 2355 | 16.5 | 766 | 3.2 | 0.043 | 1.36E−05 |
| t349766 | 10 | 2470 | 71.8 | 760 | 10.3 | 0.043 | 3.66E−05 |
| t349817 | 11 | 2238 | 118.6 | 750 | 33.1 | 0.046 | 4.07E−04 |
| t349905 | 12 | 1654 | 98.2 | 738 | 21.6 | 0.045 | 2.12E−04 |
| t350032 | 13 | 2167 | 138.4 | 736 | 22.2 | 0.045 | 4.12E−04 |
| t349904 | 14 | 1923 | 153.7 | 714 | 24.9 | 0.043 | 2.38E−04 |
| t349917 | 15 | 1599 | 130.8 | 682 | 15.1 | 0.044 | 1.92E−04 |
| t349989 | 16 | 2166 | 36.1 | 681 | 7.5 | 0.044 | 5.99E−05 |
| t349986 | 17 | 2241 | 21.3 | 668 | 4.9 | 0.045 | 6.89E−05 |
| t350040 | 18 | 1735 | 127.8 | 659 | 41.5 | 0.044 | 4.58E−04 |
| t349942 | 19 | 2053 | 38.8 | 650 | 16.2 | 0.045 | 1.49E−04 |
| t349798 | 20 | 1647 | 52.7 | 648 | 14.4 | 0.045 | 2.27E−04 |
| t349843 | 21 | 2371 | 107.5 | 646 | 18.3 | 0.043 | 1.22E−04 |
| t349820 | 22 | 1812 | 37.0 | 607 | 7.8 | 0.044 | 8.71E−05 |
| t349761 | 23 | 1687 | 94.9 | 605 | 32.4 | 0.043 | 2.94E−04 |
| t349957 | 24 | 1566 | 97.0 | 574 | 20.3 | 0.044 | 2.81E−04 |
| t349887 | 25 | 1497 | 98.3 | 567 | 27.0 | 0.043 | 1.52E−04 |
| t350029 | 26 | 1666 | 51.9 | 542 | 15.3 | 0.042 | 7.53E−06 |
| t347905 | 27 | 2444 | 15.5 | | | | |
| t349915 | 28 | 2263 | 258.0 | | | | |
| t349893 | 29 | 2221 | 583.9 | | | | |
| t349889 | 30 | 2197 | 773.8 | | | | |
| t349961 | 31 | 2134 | 362.5 | | | | |
| t349916 | 32 | 1983 | 240.3 | | | | |
| t349765 | 33 | 1970 | 91.4 | | | 0.045 | 2.60E−04 |
| t349909 | 34 | 1960 | 414.9 | | | | |
| t349980 | 35 | 1948 | 227.4 | | | | |
| t349928 | 36 | 1929 | 241.2 | | | | |
| t349764 | 37 | 1904 | 31.1 | | | | |
| t349937 | 38 | 1898 | 90.3 | | | | |
| t349936 | 39 | 1896 | 12.4 | | | | |
| t349954 | 40 | 1881 | 15.8 | | | | |
| t349797 | 41 | 1868 | 357.6 | | | | |
| t349931 | 42 | 1852 | 379.9 | | | | |
| t349866 | 43 | 1846 | 279.0 | | | | |
| t350037 | 44 | 1807 | 304.1 | | | | |
| t349819 | 45 | 1792 | 180.6 | | | | |
| t350030 | 46 | 1790 | 13.7 | | | | |
| t349933 | 47 | 1770 | 348.6 | | | | |
| t349939 | 48 | 1751 | 379.3 | | | | |
| t350035 | 49 | 1728 | 297.9 | | | | |
| t349818 | 50 | 1726 | 6.3 | | | | |
| t349835 | 51 | 1719 | 160.5 | | | | |
| t349981 | 52 | 1711 | 13.1 | | | | |
| t349846 | 53 | 1701 | 154.2 | | | | |
| t349944 | 54 | 1697 | 672.5 | | | | |
| t349874 | 55 | 1696 | 74.7 | | | | |
| t350022 | 56 | 1693 | 81.0 | | | | |
| t349979 | 57 | 1693 | 9.4 | | | | |
| t350009 | 58 | 1674 | 446.0 | | | | |
| t349785 | 59 | 1661 | 151.3 | | | | |
| t350004 | 60 | 1660 | 71.8 | | | | |
| t349914 | 61 | 1651 | 550.1 | | | | |
| t349840 | 62 | 1650 | 84.0 | | | | |
| t350033 | 63 | 1645 | 859.8 | | | | |
| t349804 | 64 | 1639 | 196.6 | | | | |
| t349913 | 65 | 1633 | 471.1 | | | | |
| t349985 | 66 | 1625 | 368.5 | | | | |
| t349872 | 67 | 1622 | 105.3 | | | | |
| t349778 | 68 | 1616 | 291.9 | | | | |
| t349823 | 69 | 1614 | 329.3 | | | | |
| t349844 | 70 | 1607 | 555.0 | | | | |
| t349805 | 71 | 1606 | 6.0 | | | | |
| t349853 | 72 | 1588 | 334.6 | | | | |
| t349828 | 73 | 1584 | 8.0 | | | | |
| t350014 | 74 | 1583 | 11.5 | | | | |
| t350031 | 75 | 1578 | 467.6 | | | | |
| t349998 | 76 | 1578 | 10.9 | | | | |
| t349808 | 77 | 1572 | 224.3 | | | | |
| t349968 | 78 | 1556 | 219.0 | | | | |
| t349918 | 79 | 1556 | 62.5 | | | | |
| t349786 | 80 | 1555 | 5.2 | | | | |
| t350007 | 81 | 1554 | 92.4 | | | | |
| t349949 | 82 | 1546 | 28.0 | | | | |
| t349827 | 83 | 1539 | 18.9 | | | | |
| t349930 | 84 | 1537 | 41.5 | | | | |
| t349790 | 85 | 1521 | 10.4 | | | | |
| t349825 | 86 | 1517 | 439.7 | | | | |
| t349795 | 87 | 1498 | 124.5 | | | | |
| 350011 | 88 | 1496 | 387.6 | | | | |
| t349775 | 89 | 1493 | 66.1 | | | | |
| t349935 | 90 | 1490 | 128.8 | | | | |
| t350005 | 91 | 1490 | 44.5 | | | | |
| t349934 | 92 | 1490 | 9.1 | | | | |
| t349964 | 93 | 1484 | 25.6 | | | | |
| t349958 | 94 | 1481 | 158.1 | | | | |
| t349888 | 95 | 1476 | 105.8 | | | | |
| t349849 | 96 | 1473 | 69.1 | | | | |
| t349988 | 97 | 1473 | 5.7 | | | | |
| t349992 | 98 | 1472 | 248.9 | | | | |
| t349822 | 99 | 1472 | 138.2 | | | | |
| t349760 | 100 | 1471 | 401.6 | | | | |
| t349991 | 101 | 1458 | 172.1 | | | | |
| t349890 | 102 | 1456 | 165.4 | | | | |
| t349959 | 103 | 1453 | 22.5 | | | | |
| t349877 | 104 | 1443 | 89.1 | | | | |
| t349892 | 105 | 1440 | 64.9 | | | | |
| t349884 | 106 | 1425 | 642.2 | | | | |
| t349955 | 107 | 1422 | 159.6 | | | | |
| t350012 | 108 | 1415 | 228.1 | | | | |
| t349770 | 109 | 1415 | 13.6 | | | | |
| t349847 | 110 | 1413 | 215.0 | | | | |
| t349793 | 111 | 1412 | 82.8 | | | | |
| t349788 | 112 | 1412 | 61.6 | | | | |
| t349956 | 113 | 1409 | 445.3 | | | | |
| t350041 | 114 | 1405 | 354.6 | | | | |
| t350000 | 115 | 1400 | 6.5 | | | | |
| t349906 | 116 | 1397 | 45.0 | | | | |
| t349799 | 117 | 1397 | 177.0 | | | | |
| t349878 | 118 | 1393 | 6.8 | | | | |
| t349922 | 119 | 1384 | 140.9 | | | | |
| t350003 | 120 | 1383 | 156.4 | | | | |
| t349990 | 121 | 1383 | 97.4 | | | | |
| t349950 | 122 | 1382 | 23.8 | | | | |
| t349791 | 123 | 1381 | 546.3 | | | | |
| t347903 | 124 | 1380 | 11.4 | | | | |
| t349845 | 125 | 1380 | 201.2 | | | | |
| t349812 | 126 | 1368 | 130.8 | | | | |
| t350036 | 127 | 1367 | 28.0 | | | | |
| t349908 | 128 | 1367 | 54.9 | | | | |
| t349783 | 129 | 1365 | 40.2 | | | | |
| t349873 | 130 | 1355 | 214.3 | | | | |
| t350006 | 131 | 1354 | 651.6 | | | | |
| t349870 | 132 | 1352 | 27.5 | | | | |
| t349868 | 133 | 1351 | 231.1 | | | | |
| t349839 | 134 | 1348 | 80.7 | | | | |
| t349838 | 135 | 1346 | 32.3 | | | | |
| t349898 | 136 | 1339 | 110.4 | | | | |
| t350045 | 137 | 1335 | 82.3 | | | | |
| t349806 | 138 | 1334 | 77.5 | | | | |
| t349842 | 139 | 1328 | 79.5 | | | | |
| t349824 | 140 | 1325 | 32.0 | | | | |
| t349857 | 141 | 1319 | 65.4 | | | | |
| t347907 | 142 | 1316 | 103.2 | | | | |
| t349768 | 143 | 1312 | 8.9 | | | | |
| t350034 | 144 | 1311 | 46.4 | | | | |
| t349802 | 145 | 1307 | 255.2 | | | | |
| t349941 | 146 | 1306 | 196.5 | | | | |
| t349932 | 147 | 1306 | 48.1 | | | | |
| t349869 | 148 | 1303 | 115.3 | | | | |
| t349927 | 149 | 1299 | 13.2 | | | | |
| t350039 | 150 | 1296 | 199.5 | | | | |
| t349965 | 151 | 1291 | 364.7 | | | | |
| t349897 | 152 | 1290 | 391.6 | | | | |
| t349767 | 153 | 1290 | 7.6 | | | | |
| t349999 | 154 | 1289 | 6.8 | | | | |
| t349850 | 155 | 1289 | 133.6 | | | | |
| t349963 | 156 | 1282 | 45.1 | | | | |
| t349891 | 157 | 1280 | 161.6 | | | | |
| t349830 | 158 | 1275 | 17.8 | | | | |
| t349984 | 159 | 1274 | 168.1 | | | | |
| t349848 | 160 | 1270 | 181.9 | | | | |
| t350016 | 161 | 1268 | 147.0 | | | | |
| t349800 | 162 | 1266 | 84.9 | | | | |
| t349836 | 163 | 1265 | 316.5 | | | | |
| t349860 | 164 | 1263 | 40.8 | | | | |
| t349982 | 165 | 1262 | 271.0 | | | | |
| t349781 | 166 | 1262 | 58.3 | | | | |
| t349826 | 167 | 1259 | 268.3 | | | | |
| t349792 | 168 | 1256 | 209.5 | | | | |
| t349784 | 169 | 1241 | 4.0 | | | | |
| t350042 | 170 | 1239 | 28.8 | | | | |
| t349894 | 171 | 1234 | 180.8 | | | | |
| t349809 | 172 | 1233 | 33.9 | | | | |
| t350017 | 173 | 1228 | 60.4 | | | | |
| t349929 | 174 | 1225 | 173.7 | | | | |
| t349763 | 175 | 1219 | 148.3 | | | | |
| t349978 | 176 | 1218 | 56.7 | | | | |
| t349841 | 177 | 1207 | 132.6 | | | | |
| t349943 | 178 | 1204 | 7.0 | | | | |
| t349864 | 179 | 1202 | 92.2 | | | | |
| t349947 | 180 | 1199 | 453.8 | | | | |
| t350025 | 181 | 1187 | 279.0 | | | | |
| t349762 | 182 | 1186 | 53.2 | | | | |
| t349900 | 183 | 1186 | 33.4 | | | | |
| t350013 | 184 | 1184 | 78.4 | | | | |
| t350026 | 185 | 1183 | 62.3 | | | | |
| t349861 | 186 | 1180 | 41.9 | | | | |
| t349852 | 187 | 1179 | 58.9 | | | | |
| 349919 | 188 | 1175 | 386.2 | | | | |
| t349811 | 189 | 1174 | 182.4 | | | | |
| t349772 | 190 | 1173 | 235.4 | | | | |
| t350038 | 191 | 1173 | 2.8 | | | | |
| t350048 | 192 | 1166 | 204.6 | | | | |
| 349854 | 193 | 1165 | 25.6 | | | | |
| t349780 | 194 | 1164 | 402.2 | | | | |
| t349814 | 195 | 1158 | 200.1 | | | | |
| t349803 | 196 | 1154 | 449.9 | | | | |
| t349794 | 197 | 1154 | 202.4 | | | | |
| t350008 | 198 | 1151 | 9.6 | | | | |
| t349951 | 199 | 1151 | 138.3 | | | | |
| t349831 | 200 | 1150 | 91.8 | | | | |
| t349946 | 201 | 1143 | 221.2 | | | | |
| t349782 | 202 | 1142 | 33.1 | | | | |
| t350028 | 203 | 1137 | 109.5 | | | | |
| t349993 | 204 | 1130 | 189.6 | | | | |
| t349970 | 205 | 1129 | 3.3 | | | | |
| t349863 | 206 | 1126 | 223.2 | | | | |
| t349975 | 207 | 1125 | 9.4 | | | | |
| t349926 | 208 | 1124 | 22.7 | | | | |
| t349810 | 209 | 1124 | 52.1 | | | | |
| t350018 | 210 | 1122 | 121.3 | | | | |
| t349896 | 211 | 1120 | 161.9 | | | | |
| t349966 | 212 | 1120 | 30.8 | | | | |
| t349876 | 213 | 1120 | 63.6 | | | | |
| t349911 | 214 | 1118 | 11.0 | | | | |
| t350023 | 215 | 1118 | 5.0 | | | | |
| t349837 | 216 | 1106 | 252.5 | | | | |
| t349923 | 217 | 1100 | 42.0 | | | | |
| t347906 | 218 | 1094 | 2.8 | | | | |
| t349976 | 219 | 1093 | 57.5 | | | | |
| t349883 | 220 | 1084 | 5.9 | | | | |
| t349886 | 221 | 1084 | 11.7 | | | | |
| t349974 | 222 | 1084 | 200.8 | | | | |
| t349813 | 223 | 1083 | 581.7 | | | | |
| t349969 | 224 | 1083 | 69.3 | | | | |
| t349759 | 225 | 1080 | 34.7 | | | | |
| t349862 | 226 | 1077 | 4.1 | | | | |
| t349912 | 227 | 1077 | 101.8 | | | | |
| t349774 | 228 | 1075 | 69.4 | | | | |
| t349879 | 229 | 1069 | 23.7 | | | | |
| t349885 | 230 | 1067 | 23.4 | | | | |
| t349858 | 231 | 1058 | 131.8 | | | | |
| t349987 | 232 | 1057 | 40.0 | | | | |
| t349977 | 233 | 1056 | 189.8 | | | | |
| t349925 | 234 | 1055 | 11.3 | | | | |
| t349960 | 235 | 1049 | 1688.3 | | | | |
| t349995 | 236 | 1048 | 188.6 | | | | |
| t349920 | 237 | 1043 | 3.6 | | | | |
| t349997 | 238 | 1039 | 12.8 | | | | |
| t349907 | 239 | 1037 | 195.5 | | | | |
| t349771 | 240 | 1036 | 98.7 | | | | |
| t349899 | 241 | 1035 | 102.8 | | | | |
| t349816 | 242 | 1033 | 61.1 | | | | |
| t349945 | 243 | 1029 | 184.0 | | | | |
| t349902 | 244 | 1026 | 7.0 | | | | |
| t350027 | 245 | 1024 | 114.3 | | | | |
| t349994 | 246 | 1017 | 46.8 | | | | |
| t349938 | 247 | 1011 | 157.2 | | | | |
| t349859 | 248 | 1008 | 27.9 | | | | |
| t349787 | 249 | 1005 | 24.6 | | | | |
| t350001 | 250 | 1005 | 83.4 | | | | |
| t349921 | 251 | 1002 | 28.2 | | | | |
| t350019 | 252 | 997 | 4.5 | | | | |
| t350002 | 253 | 994 | 428.4 | | | | |
| t349832 | 254 | 993 | 286.6 | | | | |
| t347904 | 255 | 983 | 6.6 | | | | |
| t349971 | 256 | 983 | 106.3 | | | | |
| t349834 | 257 | 981 | 517.5 | | | | |
| t350024 | 258 | 977 | 340.5 | | | | |
| t349856 | 259 | 968 | 17.6 | | | | |
| t349801 | 260 | 959 | 33.8 | | | | |
| t349924 | 261 | 959 | 35.8 | | | | |
| t349851 | 262 | 956 | 30.3 | | | | |
| t350047 | 263 | 951 | 1880.0 | | | | |
| t350044 | 264 | 941 | 57.1 | | | | |
| t349777 | 265 | 936 | 144.8 | | | | |
| t349773 | 266 | 933 | 14.7 | | | | |
| t349796 | 267 | 928 | 19.6 | | | | |
| t350010 | 268 | 923 | 13.7 | | | | |
| t349962 | 269 | 920 | 14.2 | | | | |
| t349875 | 270 | 918 | 33.9 | | | | |
| t349881 | 271 | 914 | 27.9 | | | | |
| t349940 | 272 | 912 | 13.6 | | | | |
| t349948 | 273 | 912 | 60.4 | | | | |
| t349882 | 274 | 906 | 57.4 | | | | |
| t349996 | 275 | 903 | 3.8 | | | | |
| t349967 | 276 | 902 | 11.8 | | | | |
| t350046 | 277 | 900 | 66.9 | | | | |
| t349776 | 278 | 894 | 56.5 | | | | |
| t349779 | 279 | 892 | 56.6 | | | | |
| t350020 | 280 | 890 | 31.4 | | | | |
| t349952 | 281 | 882 | 6.1 | | | | |
| t350015 | 282 | 878 | 5.4 | | | | |
| t349815 | 283 | 876 | 386.3 | | | | |
| t349833 | 284 | 858 | 430.4 | | | | |
| t350043 | 285 | 845 | 42.4 | | | | |
| t349829 | 286 | 820 | 130.3 | | | | |
| t349769 | 287 | 808 | 26.7 | | | | |
| t349855 | 288 | 800 | 42.5 | | | | |
| t349903 | 289 | 788 | 1.7 | | | | |
| t349880 | 290 | 787 | 11.4 | | | | |
| t349901 | 291 | 782 | 8.4 | | | | |
| t349895 | 292 | 776 | 29.0 | | | | |
| t349789 | 293 | 759 | 94.1 | | | | |
| t349972 | 294 | 759 | 174.6 | | | | |
| t349973 | 295 | 741 | 438.9 | | | | |
| t349807 | 296 | 690 | 29.3 | | | | |
| t339616 | 297 | | | | | 0.043 | 1.32E−04 |
| TRFE_ | 298 | | | | | 0.053 | 1.57E−03 |
| HUMAN2 | | | | | | | |
| TRFE_ | 299 | | | | | 0.046 | 5.72E−04 |
| BOVIN2 | | | | | | | |

### EQUIVALENTS

[0140] Those skilled in the art will recognize, or be able to ascertain using no more than routine experimentation, many equivalents to the specific embodiments of the invention described in this disclosure. Such equivalents are intended to be encompassed by the following claims.

[0141] All references, including patent documents, disclosed in this application are incorporated by reference in their entirety, particularly for the disclosure referenced in this disclosure.

The application's sequence listing, which the Patent Office published only in electronic form, follows.

SEQUENCE LISTING (1277 sequences)

SEQ ID NO: 1 - protein, 123 aa, Methylobacterium extorquens
MHHHHHHGGSGAPTTTTKVDIAAFDPDKDGTIDLKEALAAGSAAFDKLDPDKDGTLDAKELKGRVSEADLKKLDPDNDGTLDKKEYLAAVEAQFKAANPDNDGTIDARELASPAGSALVNLIR

SEQ ID NO: 2 - protein, 104 aa, Artificial Sequence
  Synthetic polypeptide
MKHHHHHHGPGYIDTNNDGWYEGDELLAMQIFVKTLTGKTITLEVEPSDTIENVKAKIQDKEGIPPDQQRLIFAGKQLEDGRTLSDYNIQKESTLHLVLRLRGG

SEQ ID NO: 3 - protein, 105 aa, Artificial Sequence
  Synthetic Polypeptide
MKHHHHHHGPGACADYNKDGWYEELECAAMQIFVKTLTGKTITLEVEPSDTIENVKAKIQDKEGIPPDQQRLIFAGKQLEDGRTLSDYNIQKESTLHLVLRLRGG

SEQ ID NO: 4 - protein, 188 aa, Unknown
  Environmental Sample
MHHHHHHGGSGSSALAFASFQQQEISMKTINTRILDLTLAGALSVFTTASALAAPTVMPGFKTADGNGDNMVSLQEFQEKGGFEQAFHEGDANRDRRLSDDEYTKAIANNDRLQAGKYIDDAVITAKVKALILKDEGVKGLEVNVETHQGMVQLAGWVDTPTQIAQAEKIARSVEGVKGVRNALLIKR

SEQ ID NO: 5 - protein, 247 aa, Unknown
  Environmental Sample
MHHHHHHGGSGSSIGSVGSTAAMMQSMSAMRRPSAADMANKLFSALDTQGQGYLEKSDLASALSQIGSTGESELDEVFAQLDADSDGKLTQTELTDSLQRLSDQLDQQFDSLRMQGAMGGMGGMGGMPPPPPPAQDSGFTEDELNAQLAEIGDTDDVRADLLETVLNNFSAADTDGDGKVSFTEAMAAKQAADGSAAATGTGTSTAAASGASSDDGLKVMMQIMRLMQAYGDSEQGTRPAAAISVNA

SEQ ID NO: 6 - protein, 149 aa, Unknown
  Environmental Sample
MHHHHHHGGSGTIRHSRLLLACAIGALFAAGAAHAQGERGAKPRPEPPIGVAELEDRLAARSAEIDADGDGYISFEELRAWREAQRERRMRERFARLDSDGDGRVSVAEFEARHRARIARLDADGDGVVTREEFRALRGKHGRMHRGDR

SEQ ID NO: 7 - protein, 244 aa, Unknown
  Environmental Sample
MHHHHHHGGSGTSAISSSTSSYTSWATTTTTARRPDSSRLSEDLFSALDTSSKGYLEQADFESAFSSLSIDDSDAASAEEVFKALDADSDGKLTQDEMSSSLQKLADELDSQFHQMRMEQGGMGAMGGMPPPPPPAGEDEGYTADELSSMASEIGSTDSKMSGLMSSIAENFDEADANGDGRVTASEARAYDESQNTSATSATDGSSSSASSDSLVLKRIMELAASYGDSSFSSTASSLLSVTA

SEQ ID NO: 8 - protein, 186 aa, Unknown
  Environmental Sample
MHHHHHHGGSGLQGADAPTHGGYVMKMKLIAATAVLIAIPAVALAHGDGERKGRHHGHGEKRVERLDTDKDGNISAEEARAAGAKRFSMIDANGDGVITPDEAPQMFERPDANGDGQITADELAAVSAARVMRADANGDGVVTKEERQAAHEAMKDKRKAMRDKRKAEREAAPAEAPAETPAPATP

SEQ ID NO: 9 - protein, 115 aa, Unknown
  Environmental Sample
MHHHHHHGGSGKNIMTILFTGSAFLVFLITGLVFAQPGFSDADSNADGVLSIEEARAALPDVPIEDNNGDGIVNLGEAERAVPGLQLSPDGRGDPDAPVGQAEYQALASAIEEQR

SEQ ID NO: 10 - protein, 144 aa, Unknown
  Environmental Sample
MHHHHHHGGSGFDKDSDGIISLEEFGAAMNALGLTPTKEELEILLASVDTDANGVIDFGEFVDVMSAHLWGAGEGPSAEDELKEAFQVFDKDGNGFISKEELKAALLNLGEQLDDDELEAMIKAADKDGNGEIDYEEFIQMMKS

SEQ ID NO: 11 - protein, 385 aa, Unknown
  Environmental Sample
MHHHHHHGGSGPYHRLAPHRALVCVCAAAEGQPAGRDGRFRRLDRNRDGKITRDEVPPERQPLFERLDADGDGAISSEEHRAFRENQQRRPPAGRPSPPEPDFANVAYGPHPRQVFDLWRPAANAAAGKPSPLLVFYHGGGFRGGDKSRISLSLLRQLRENGVAVAAANYRLTDTAPFPAPMHDAARALQFIRLHADEYGIDPARVAATGGSAGAGISLWLAFHDDLADPAAEDPVARQSTRLAAALGTAAQTTYDPREHLRIFNSTELEDAMFAFYGMESVEQLAEPRFQALFEEASPINHATPDDPPVMLAYSQPNTELPPNPPGKLYIHHPKFGFLLKEKLDGIGLECVLKLREDYPENGQNQAVQDQVRFLCEKLGVALPE

SEQ ID NO: 12 - protein, 313 aa, Unknown
  Environmental Sample
MHHHHHHGGSGQAKLVAVLVVGAAAAAVGGAVFAFGGSKSPEPQAMPVPVPPAPQPVPVETAMPVSPFDSSPSLNDMMSRFGGGRGDFGDWEARLQQFDWGEFQRLSPEERRARMQAIRAEIEAQMDTNGDGVVDEDERLDAMLASPMGRRILERFDSNGDGILDEAERQAMREEEARRRAEQEARMLERWDRDGDGVLSRQERRAMEQDQRRRQEEQMRRMAAEFDQDGDGELNADEQARAWQITRERREIDAFVRRYDSNGDGRINTTDLNAFLQLYQAGDRRADVNNDGVVDALDVTAFRDMMNRSANRP

SEQ ID NO: 13 - protein, 227 aa, Unknown
  Environmental Sample
MHHHHHHGGSGPMEVNEFQGDALEEFYVKRRPLMKIMFLFAIIFLFVASGAALAADAVKSPAVAKSAYSRMDTDGNAVLTVTEHAAFWQGRFKDIDADDDGKLVLNEFHAATREFFGSMDKDGDGALIAKEYFAFWCGPKALNPAPVAGKPQRKIDANGDGIIDDDECVAFWAANFYDVDQNADGKITLDEFMAAMTRRFRQIDQNRDGFISIEEHAYFMKGGDARK

SEQ ID NO: 14 - protein, 227 aa, Unknown
  Environmental Sample
MHHHHHHGGSGPMEVNEFQGDALEEFYVKRRPLMKKMFLFAIIFLFVASGAALAADAVKSPAVAKSAYSRMDTDGNAVLTVTEHAAFWQGRFKDIDADDDGKLVLNEFHAATREFFGSMDKDGDGALIAKEYFAFWCGPKALNPAPVAGKPQRKIDANGDGIIDDDECVAFWAANFYDVDQNADGKITLDEFMAAMTRRFRQIDQNRDGFISIEEHAYFMKGGDARK

SEQ ID NO: 15 - protein, 224 aa, Unknown
  Environmental Sample
MHHHHHHGGSGPRRAFVFAGLVLSTTALADVHDFPSADSDVVASVGFIDAERVGFFWTSVRGDRVRETLADAAPQVTGAIFDFEIRDNALRETLSWALLINGVEVATFQVPPGLSGPQQIDVTFPAIAAAGGGYEVSFEARNVISGGAGSHTLVYAGAGPHQIELIGEACAADIDGDGQLTLFDFLEFQNLFAAGDLRADFDGDGSLTLFDFLEFQNAFAAGCE

SEQ ID NO: 16 - protein, 163 aa, Unknown
  Environmental Sample
MHHHHHHGGSGRSLGQNPTEAELQDMINEVDADGNGTIDFPEFLTMMARKMKDTDSEEEIREAFRVFDKDGNGYISAAELRHVMTNLGEKLTDEEVDEMIREADIDGDGQVNYEGKSLHCHSCILCFTIRSYPFKRSTALQTRIKPFLVTIFGTIVEQFEKLL

SEQ ID NO: 17 - protein, 258 aa, Unknown
  Environmental Sample
MHHHHHHGGSGPRTRIGYSVLRTHSRRTRMKHAQISAAVFAALALSAAGLAVAQPAENRRVQAQVDRLMANDRNGDGKLSRDELPARLADRLFAEADTDDDGLLTREEVTAHVMGARPAGEDATPAQTAQPGAGPESGHQAFEGAMKQAGASMRALRRSQFAASTRDSDLDAAQSMQEAMIAAKASFGSVAMSAAARARFGEDQDAYRRAFRLAIIESLRAAIDLEQAVLEEDQPKAQAAQARLMTTQKTAHDLFQDE

SEQ ID NO: 18 - protein, 512 aa, Unknown
  Environmental Sample
MHHHHHHGGSGSKRTNLCAWASRVGLVGVLGVAMPFAGGALAQPCDPTMLVAEHQRFAAGTTPLDAALGDFDGNGIIDLAIVNQQSDDVSVRLGLGGGTFGPEQRFAVGDSPRDIATADLNGDGHADLVTANQSSMDASVLLGRGDGTFEPARSISTQANGFGVALADLDGDGDIDLALTNSGGGMSVLLGAGDGTFGAPTTYPGGTGSWSIVLGDLNLDGVPDVAFTNSTSDDVSVRLGLGDGGMGPETRLPAGDTPRGVALADVNGDGHPDIITANTNDSNASVLIGRGDGTFEPQQTFAAGRGPWEVATADLNGDGHADIAAADSADGALTVLLGVGDGTFQAPLSFPTAGIHRGIVLGDVNGDGGTDAVACTVGGSGAVIVLLNRCVALPRFTLQPLGIAIDPGQSALLEALAVGTTPLFYQWRRNGVDLADGGPFSGATTPTLTIEPTTTALSDTYDVVATNAFGQTASTPAVVAVRDTCPADFDGDGQLTLFDFLAFQNAFAVGCP

SEQ ID NO: 19 - protein, 385 aa, Unknown
  Environmental Sample
MHHHHHHGGSGVAASTPERAAEVAKFNEAFKKVRLNSEPLSTSDIINLSRGLADVISIDSLPRALLLNICRYMQIRPFGTDAFIRRQIRSKMSSLQLDDALIDQEGVENLTYEELVNACHSRGIRSFGAVSKAELQKELRLWLDLHLRSEIPPVLIILSRALSMYEPTAETNKAIQQAIMALPEDVVEEVSSTAETDGKSSTDYQKKIESLEMQQEMIDRELEEISEKDTQTIGPSDVADLSDALSKLSSSSKEDTSQQMDEIKSLKIDVAQLKEDLSMQSSMPEADKALELEGKLENLVNDIEAELLKLGDQEATPIKISKSNDEVITLEDLEVLLRTLRTSNFSDEKIARLFQALDRDNDGRIRVKDIMELGNLIEKQRSSLN

SEQ ID NO: 20 - protein, 403 aa, Unknown
  Environmental Sample
MHHHHHHGGSGENVVYLDNSATTQVDPEVIAAMVEMMEKEYGNPSSLHRMGMAVEKRMNKAREQVAKVLGAKSKEIIFTSGGTEANNLAIRGAAHQYSGRGKHLITTTIEHPSVLHTFQRLEKEGFTITYLKVDRNGFIDLEELKAAITKETILVSIMHVNNELGSVQPIQEIGTLIKAVDRRILFHVDAIQSFGKLPIHPLRMKIDLLSVSGHKIHGPKGVGALYINEKVRVHPLIEGGGQERDIRSGTENIPGIVGLGVAAELIEKDRLMKGKELAERKIWFLQEVQKRISDLKINGPVSGQEVEAGVSAPHIINLSFPGLKGEVLLHTLEDRQIYVSTGSACHSRQSGPSHVLQAIHLTPRELESALRFSLSYHTTKEELAYVLEVLPGLVEELRTLMQR

SEQ ID NO: 21 - protein, 175 aa, Unknown
  Environmental Sample
MHHHHHHGGSGHAARSQALKQPEFGWSACLAISARAGHKPHCSLMKHTLPRYLLAGLCALAFSFVSATAFAQGGADKKPKEPSKADLKKYDANADGVLDDAELATMKADKDAKKAGDKQARLDKYDKNKDGKIDKQEAEAEKADKEAAKAAKAEKKMKDDAKKADRAKEKSKSKN

SEQ ID NO: 22 - protein, 157 aa, Unknown
  Environmental Sample
MHHHHHHGGSGRNRSMLLTTAALVVFWATLHTPASAHGLQIDADQDGVVTVTEFQAAFPEYAANPDINEDGVVDREEMHAARTEMGDTGGARQRKGGSDTAKASRSGDCSGDGSGSGGKGGSGGGKGGSGGNGNGHGGGGQGGHGGGNGHGGRGGRS

SEQ ID NO: 23 - protein, 219 aa, Unknown
  Environmental Sample
MHHHHHHGGSGNTSKLIDVLPPTVMAELQAVITRFQINTPRRLAHFLAQCGHESGGFKRVTENLNYSDPVRICQIFRKFDKDKDRVIDPEEIQYARGFIQNPEKLANYAYANRMGNGSPESGDGYRFCGRGYIQLTGRDNYTAFNKFVADDIIATPRLVATKYPLFSAGWFWHTNRLNAVADTGTVEQVTRRVNGGTHGLADRTARFNRLLPLLTPAQA

SEQ ID NO: 24 - protein, 381 aa, Unknown
  Environmental Sample
MHHHHHHGGSGNRTKSDAGAQPLTPRQPGGAAVGWAQGEGRAVHGLVTSRSGFRGERAADDALARALRQLHPFLAIRFLLALALASVRGARAIVLAGLGDAVALLRLVLRGIGRESRGCENHGTDGRRENRRLRVHRSSPSSQWVSGQRADRATPVPIARAAKNQRFAAVASEMKKAGHNALRHAAADGGSPQRAGGESAKNAGPGSCTGDPPQLRPCPQRRPPMKSAAIPLLSLLLITAGTSAMAADSMASFATGGYANQLRTPEMMHKIDTNKDGMVSKAEWDAYQQKLFAMMDADASGALDNKEFMQAHRDDVASFATGGFSTALRTSEMFAKLDTDHDGKVSREEFAAYQSKLFDMMDTGKTRMLGQNEFFGRGPAH

SEQ ID NO: 25 - protein, 410 aa, Unknown
  Environmental Sample
MHHHHHHGGSGAKFLQDAVEEMSATGLASPAAKEFAELYKKARITGEALTMAELERVCHSLKDSLTIDNLDRAQLVSLCKYMDVKAFGTDAFLRYQVRKALTNIYRDDEEILKEGVDSLYTQELENACRIRGLFYPGINASAMRRELNLWLDLHLKRGIPSVLLILSRALTPNMSLLRPEEALKDTILSLPDAVVNEAELHQRELGGSGAVSYKKKLEVLEQQQDLIAEELAQERESKKLTANDEQITKDDLKTISDTIQVLSSENPVELEEQQLAELKADMSEFKSDAEKLESLTNNKLKEPKASEIIGERLGKMVGEIEAELLSLQDKVGDRLKLLCPDRDGSLTVDQLERVFQLIRDDPAESERLQNIIQSFDTDKDGKILISDILKMAELAEEREGQGRLVSKNEP

SEQ ID NO: 26 - protein, 190 aa, Unknown
  Environmental Sample
MHHHHHHGGSGRNHVLVLTASAVILACGVAASAQAPGAQGPGPQQNPTIQSIPGGPMMQQQDQTIRERLREQLQERVQRGEEEDSDQDGYHYRGGMMGGGMMDRGMMGRGYGYHDGDRGGMRPGMWGPPMMMRMIFSLMDADGDGKLSLQEFQAAHERIFKAMDANKDGRLTPEEMQSFMQGARRSAQPQ

SEQ ID NO: 27 - protein, 115 aa, Unknown
  Environmental Sample
MHHHHHHGGSGMKHHHHHHGPGACVDTNNDGWYEGDECAMQIFVKTLTGKTITLEVEPSDTIENVKAKIQDKEGIPPDQQRLIFAGKQLEDGRTLSDYNIQKESTLHLVLRLRGG

SEQ ID NO: 28 - protein, 620 aa, Unknown
  Environmental Sample
MHHHHHHGGSGHSSCSTRYAGILGLLLAPVVFLAAISGASERAGVPTENGADTPEPLSDPILERITPAGLNAGLEIVASGLVAPIGIVFPDDGTGRMFVAEQTGVIWVYPASGGRRMLLDVSERLVPLGIGGPGSFDERGLLGFALHPDFAVNGRLYTYTSEPFGDASDFPIADRSDPNAHQSVVAEWGIAADNPERVDPASRRELLRLDQPQFNHNGGALRFGPDGYLYIGLGDGGGRDDEGPAHGPDGNGQDLNTVLGSLLRIDVDIDEGDLLSANGRYAIPPDNPFVEAGIAEMFAFGFRNPCSFSFDSADGALYVADVGQGDIEEVNRVEAGGNYGWRVKEGTFFFQNNGDEAGFVTATPAAGQSGDGLVDPIAQYDHDEGLSIIGGFVYRGTALPDFDGLYITGDFGTSFGTPSGRLFLVDANNTFFEILIGEGGAAYPYFVKNFGQDRSGEVYVLASQNAAPSGNSGVVHKLVPVGTGTTDDERAIAAVLLAQFMLADSDGSGALSIAEAQGLVGELPATVYANLDLNSNGAVTRVELEAVVDGSGGEGEGEGEGEGEGEGEGEGEGEGEKGPLPACNAGTGGGTGTPWGAWLLVAVMVGYLLFHTRPGASSER

SEQ ID NO: 29 - protein, 778 aa, Unknown
  Environmental Sample
MHHHHHHGGSGPGSPIRSSIVARSLGIVVGLSCAAWAIAVPPPSQDGGRHDQGPSTPSGPAGGEVYPAHNVVLKSRVPLQTFNMGDGADCWGYTSPSGREYAIMTFTGGVSFVEVTDPGAPEIVQNFPTNGTSLWADAKVIGDKCYFIKDRLDTGLQVYDLANIDQGVVTKITEYRGFGIEWAHNIATHAESNTVYLCGANAPTDALVAIDVSNPASPNVVGTYTDVGYIHDAQVVTWPHPGPWQGRVIAFCFAAEQGIDIVDVTNPSSTVRLARVGYVGLSFSHQGWVDVETRMLYQNDELDEIDGNVATTTTRVFDVSNLASPQFVGSFSTGLPTIDHNLYTRDGFVYQANYQSGMRIFDVRTSPTNPVEVGWIDTFPAGDGLSFDGAWSVYPYFPSGNVLISDINRGLFVVDPTFALVGGTPAAFEFVGERPTDVPQRGAGVRVRITGDNGRAVDPATATLTYHIHPRPGSDHSHMYHTLPLEPLGNDEYLASFPFLPCGEMIHFYFSITSTDGLTVNWPLSAPIEKFPADVADRTIVAFEDDLESDLGWEVGDITDTATTGIWERAVPVPTTFAPGSDASDSGAFAFVTGNGTPGGSNGANDVDGGATTLTSPVIDASEARGRVAVSLWFKGQTLDTGDGLFVELSADNGATWVRADTIEEPLANWVRREYALEAFIPRSAQTRIRFIAADRNIPSLVEAGVDDVLFTTKVCDPLLEGDANNDGTVDFADLNAVLASFGQSGFMPGLLSGDVNNDGVVDFADLNATLANFGTSN

SEQ ID NO: 30 - protein, 830 aa, Unknown
  Environmental Sample
MHHHHHHGGSGIRAVLLAGLIASPSAVLASSPPTLSAARFVPGDASIAAAPGVQHKSAISKGGDQYLVVWEDRASTISNIAWEQTESDIVGIRLDASGQPIDATPFTISRNLGYQRRPEVVWTGESWVVAWENQSPTAGYYESRITAARVSSDGEVIGAPFEPFPTNGGNDFHMASNGSTVVFVTQSHNAGEGGLLARQMNPDGSFVGGTVILAPETYFLYFFVDVQSAGGEYLLTYNADTGPVVRRFSSTLEPIGGPVSIPGRRFIASNGSQYLLVFEGGQFGNTLLASPMNVDGSLVVPGGTPLHDQFNGAILSVDAAYSEGVWWLAYKEAWNGLSYQRMTDAGALLDPALLVYPGVSRDWVEAPKVAPATGGGVVTVWDDSRSINGVWPSEIYTGKVSSPLSFTEPDVLSLAAPSQMSPEIAAGPGHYLLTFASQTSAGVRIMAQRIASNGAAIDEEPIEVAAVNTVGGSPAVAWNGASYLVVWSDGLNIMARRLSETLDLLGDGPLTLMPGSTPDVSALGENFLVATTSFATYPQFRDTWVRRVSGEGALMDAGRIYVGGGYAQFSRVETFDDRWLVCWQNNWTHDSPNSDLVARFVGADGVPGASIGVASTSGASGHPDIAVGPDYALFVWRQNTLANANNDVMCRRIRPDGTSPDAGNVMVSNAPGRQLFPVATWTGDEYFMAWDDRRNADTFFDARDDVYGSRISSAGAVVDPAGVAIFSDDRPEITPAIASMGNGRFLVAASVFRDEVGLQGYRIAVRAGGPQCPADLDGDGEIGFGDLNLILTNFGLGTPGAETVIGDVNGDGVVNFTDLSEALSAYGGGC

SEQ ID NO: 31 - protein, 304 aa, Unknown
  Environmental Sample
MHHHHHHGGSGRRRYRSRAGRFGAVSDLTPPHCIRKRSPMNLANVFGLAVLSLPCAVLAQEYAWINFESTRALEATEFASSAVRMPDSLRIAADDFLVGEPVRLSEVVFYSVWIDPPVILGGDWYIYQYDEATRSPGALVMGAFDVSLETTDSGLVSGNFGTIYRNAMAVDVELEPGRYFLGFRTHVAPGAGKPVNAPLHPEWSNGDATAQWNFSALTSGEVFEAWMPMTDFHPTLKEWAFELHGTSRTCRADIDGDGSLTLFDFLEFQNLFASSDLRADFDGDGSLTLFDFLEFQNAFAAGCE

SEQ ID NO: 32 - protein, 458 aa, Unknown
  Environmental Sample
MHHHHHHGGSGVAPQVRQVPGEADPEKKIANPTPMYKTFPLPRKRIIIVCLLTALIGLTGKEIRAVDFLPTSVEVQVACGDGLAEYGSAEICDPGNPLQGIKPDVGTTTCQMYNDLFGNPFQSGSMDCLEDCSDFNPHYCFTCGNGYKELREACDKSDFGGRTCISFGFSGGSLYCTPVCQISTANCIAMDSEGGVPGGGGSSGGSSGSTFGYSPGADTQKETKVVIKGKSYPNSDVHILLDGAVVGIVRADAKADFYFESAEISPGVASFGFWSEDKDGLKSTLLTLTLRVTRGAVTTVTGVYIAPSIDVDKKSVRQGEDIRIFGQTVPDTTVKVHIHSENQFVEEASSGPGGDWEIVFNTQPLEEAFHTAKAAFEVEVGGNLIKSGFSRSVSFAIARLGGEAVCLEADLNGDKRVNLTDFSILLYHWGSSNACADQNQNGVVDLIDFSIMMYYWTG

SEQ ID NO: 33 - protein, 207 aa, Unknown
  Environmental Sample
MHHHHHHGGSGPRSVEQLEQIRKQKKAHIRQTALELFAENGFHATSISQISKKAKISKGLIYNYFQSKDEILEDIFDWAITTVYSNFDLNKDGMLSTEEFIHFIRVSLRTTMENRPFWKLYSALVLQPHILETYTAKYEDMGKEIAGMIRNFIVSQGSVSPDKDLFAISCLLKGANLILITAPDFFPVENLEKDTIEACFKLISKNE

SEQ ID NO: 34 - protein, 430 aa, Unknown
  Environmental Sample
MHHHHHHGGSGPKGVRQDEFMLFALLVLTGMLLVFSGARQGQAVEYLPTSVEVVLSCGDGLREGLEFCDPGEPGILPPDTGTTTCSQFPDIFGNPFTSGVLGCTVDCSAYLDDTCYTCGNGHKEQEEECDGADFGGRTCITYGFTGGTLVCTAGCHISLALCVAPDEEGGVSGSGSGGGSPSGGFSPGMKTELATKVVMRGKAYPDADVHILIDGITAGIVRADSKADFYFETTEVTPGVASFGFWSEDKEGLKSTLLTLTFRVISGAVTTISGVYIAPSIDVDKKSVVQGEQVTVFGQTVPQTEVHVHINSEQEFIEQVSSSDSGNWSLLFNTEVLEEDFHTAKALFQFETEGNAIKSGFSKSVSFHVGRIGGEAACPNADLNKDGSVNLTDFSILLFNWGTNNACADQNQNGTVDLIDFSILLYYWTG

SEQ ID NO: 35 - protein, 226 aa, Unknown
  Environmental Sample
MHHHHHHGGSGWKAGLLAAALTIGFAGAAGAHPHVFVESRAEVVFDDAGRLSAVRHVWQFDEAFTAFAVQGLDENGDGELSREELQPLAEVNVESLAEYDFFTFLHHNGTDIAFEPPREYWLDFYGGRLTLFFTLPLREPRVVDASTVELDVFDPAYFVAFEMTPETPFALVGAPQTCTLDFTPPPALDPQTATVLAAIPQSERQLPSDLMQITETLSNSARIGCK

SEQ ID NO: 36 - protein, 715 aa, Unknown
  Environmental Sample
MHHHHHHGGSGNRPISRSSLGAAALSLVAGGAFALDEVPEFAAVNIGAMIDPSALSFARAVSEDGDVVGDIFLNSSISRALVYTFEHGALLLPLIPGQSTSTAVDISERDENGIVVIVGRVGFLSLDPFQPNGQAAIWRYSTVTNEVLDSFVFGPLPGFPFATGLSVTNSGKVLGVSRTAPMIGGPNPQGMIYDIGAGTLSPVVFPVPPSDMNNNDVLAGGTWIGPLGGTPVDIGIPSGTTSASIARLNDIGNAVGTALFPFTDGAGRFVRGAIRYTDGWAVLWNNSAFDFGVDINDHGDVVGSIGISAATRPALYIEALGGTFLIEGLISPSTPASLGTVAAINNHGQIVGGGPAILLTPLGTMIIPGDVNGDTNVNLQDLCAWLADPVDLDDDGDADADDEQWLIARLTSLGFAVEDCNMNGVPDACDIGSGFSADCNENGVPDECEPDCDAAGLPDSCESDCNANGIPDECEIASGLAQDCNANGIPDECDAPDIVNAMRIYDTPPLLFAGSVFTDSLLVTEVGVIADVNFLLNIDYRIGDLAVRLAHEGVTVTLIARPGIPMNSFGNGQLGYRITLDDEGNGPNIENVGNFGSPFEPITSPPSYRPNNPLASFDGLPRAGVWTIEVETFNASPLNQLLSWGLDILDEAVPVAPCACPGDTNGDSQVNFTDLNEVLASFGGAGGTGADLNNDGVVNFADLNEVLANFGVSCP

SEQ ID NO: 37 - protein, 150 aa, Unknown
  Environmental Sample
MHHHHHHGGSGLLARQNTNHINNNFVAMKAKMTVYQKGGKMPIVPDPKKKMTADQQFNASARSREAENLTEMRNALKPEGKEAVRKFDEELKAKGFMVVKKPSVKKMAGGGKMPMYGMGGKMKKYLKGGQVKLDKNKDGKISGADFKMMK

SEQ ID NO: 38 - protein, 303 aa, Unknown
  Environmental Sample
MHHHHHHGGSGSKKILVIAGVLLAVGTVAAISAPHFRGGGPMRGPHGPAFGEFGGDLFGGSPVRFGERLKELDADKDGVITLEEFLSRRAPTFARIDKNGDGAIDRAEFEAAAKESADYWTKRFIKRFDADGDGRIGKEEFAKAHRERLAMRDVDGDGQIGLEDMPPGPRERLRRWMGDRAKDGEDGKEARKGTEESGKEAKDRGGFDLKRFFGRADRRFDRLDKNGDGFIDAKDLEPVAAERAAFASKRFFRRFDADGDGKVTKDEFNRFAKARFSSFDIDGDGKITDADLPPMMRGRGFLK

SEQ ID NO: 39 - protein, 200 aa, Unknown
  Environmental Sample
MHHHHHHGGSGATPGRDTRRASKASPSRIPVRPSPRPAPQAPSIGEPPMSRNPIQTKTRIGLLAIALVGGANLATSAFAVEALPQGYQLAAADKAGEGKCGEGKCGASKAKVTQAEGKCGEGKCGDASFTRTDSDHDGKVSRDEFLAVARDRAGDFDGIDADHDGFISEAEAYQHLKNVFESNGKPMPAGLFARFQGDRH

SEQ ID NO: 40 - protein, 115 aa, Unknown
  Environmental Sample
MHHHHHHGGSGMRQLLCALVVVAMGLGMVGMARAADEKPKKQFDPEAAFKKLDKNADGKVCLDEFKGKKKDEALANAEKVFKAKDKDADGFLTLEEFKAPIKKEGAKKQKKEKKE

SEQ ID NO: 41 - protein, 745 aa, Unknown
  Environmental Sample
MHHHHHHGGSGCLTAEATSVSLSDPARRARLNRASLLVLTAGLAVGATAFAAPLQLRAGAIDTSRPINALQVDEAADLGLPPALVDLRPSDRLVIQLDGPMTKQRRAAIDATGVRVLGYLPPNAFILTIPEGVNADAARNLDFVRWSAPYQPGWKVEPSLLGLEGALDVNISFFADETEELAKNALNTVAGVQVHNAGRNGREILVTATVPANLLSQIAMLPGVQFVEPALEAVERNSTSHDAVQSGQSNLQPLWSNGLTGEGQVVGVQDSKINVNHCMFVDTMPIGPGHRKIVNYIGTLGASTHGTHVAGTIAGNRIGTGPDDDFHGVAYSAKIAYAPSPAFLNGTQFYNQLEIAHNFGARVHTNSWGADGRVDYNAWTRAIDDFSYDFEDSLVVFAVTNQGVLFTPENAKSVLAVGASDRSFPTGINNHCTAGVGPTQDGRRKPEVYAPGCGIQSASSGSSCSVQSLSGTSMATPAISGAATLIRQYFTDGYYPTGVVGENESVFPTGALLRAVVLNSTRDMTGISGFPSNLEGWGRLVADDALYFPGDSRSMVVRDVRNTADDALATGETYEFAVQVNGSEELFRATMAFTDAPAAAGAFNAVINDVNLVVESPSGTIYRGNAMSGGLSIPNTATTDGINSVEQVLVASPEPGVWTVRVEAPSVNVGEQGFAIAVTGEVAEASTVDCSGDTNGDNVVNFTDLNGVLAAFGADARGPADIDGSGTVDFTDLNIVLSNFGNDCN

SEQ ID NO: 42 - protein, 590 aa, Unknown
  Environmental Sample
MHHHHHHGGSGNKNAVTLILGLFTALSALSAAAQTLPESGWRTLTYDTTKAPADNPLKGFVPFSGEYDTFPHSMEFDYVGFATLMSGPNTFTFETGLEPLLNDIAGRGHQAIIRVYLDYPDTDTSVPQFLLDAGVTLTPYNGSSGQGMSPDYDNENLVSALEAFIAAFGARYDGDPRIGFIQLGILGHWGEWHTFPEEELLPSVATQNRVLTAYDAAFDQTQILVSQDILGHDPMAAIAGKNIGFHDDDFTNATLPTDESHFWSRMQANSLDTRWQTLPNGGEVQPDFQQVVFDNPSTAPEDFNSCVDTTHVSWLLYHQAFEGESGGSNGWNAAKVQRAIAGAKRTGYEFYISERNLPDVSEDTTLRLGVRIQNRGLAPFYYDWPFSITLLQVSGKGIKQIALPAPDWALSSIPADGASHEFIYTLDPNPLSAGEYTVYLSVPNPLPNGAPIQFANATETGTGVALGSLIVHQSLEPGEGEGEGETDLERKGDDLLTGYDDLDEDESGGLTLAEARVEEPGLTQAAFNTIDTNNNGELSEAELRAQLPPGGTSGCRLLGGKDARFQHGDVFLLGLASALLLLWSSRTARV

SEQ ID NO: 43 - protein, 326 aa, Unknown
  Environmental Sample
MHHHHHHGGSGTTFDTGFRLGDGRWIIGSRVRMSYLDSLGHYVPTSWSAYHFVNNTLGAVYYSSGHRTFFDYEFYNDITFVADFAHCYRARAIATAGNASQEVGSGRVCTPWNDPMSEPPGENCVPTEWFACPPPGSPQYDDPNNMYCNGPCVTSPLIVGLDRGRYRLTDAAHGVRFDLDADGVPEQTAWTAHGEKLAFLTLDLNQNGRVDGGRELFGDKTYLPNGATAANGFLALAQHDSNGDGEIDASDRVWPALRLWVDTNHDGVSQPNELTPIATSPIRRLGLAHHRTGGRDPHGNLFRYRGRVQFTDGTEQNYYDVFFVSE

SEQ ID NO: 44 - protein, 181 aa, Unknown
  Environmental Sample
MHHHHHHGGSGFKGCLAMNKMTIVLCVVFYSFSNVVAAEVSSLQAAGGQVILDWNDNTESDLTGYKVYRSVSQEGPFDKIAQVSASYYEDDDAINGKTYFYFVTAVDDSANESPGSDKAYASLRTPGDIDGDGLVGFTDLALFARSWLVNDCWYCDGADLDGNEQVDFYDLAIMAQNWLSE

SEQ ID NO: 45 - protein, 585 aa, Unknown
  Environmental Sample
MHHHHHHGGSGQGIQVQTRSIVVLALLASAGRAAFADPVVNDYCVEHDFSIRTRGNLSPHLVLQHREYAFAQCGRAKDGPIDNRANTLVGLGVTTFNAHADAGTVSDANSESNVTALAVGTASGEIRVYGDVDLCPSAPRQRYAYGRAFSAAKLFYRGRNMDRRGRIGWAGGWRAEPGIQGGIGKVRRIDPVIGRVTDRTTGVTTEHLLIDIENFVQGGVFEWLNDRVTNTAPTMEFRIIMPGSASPSTGFLVVRARDGVVVESFATGEFAGVAVPAVGDDATFAFDLPNARDIEFDMPGDDDHELDVEIEMGGAGEHEEAAGALAGDLYITTALDKGPDQSPLYQHDSATEPGVPLFPGELTVAQPFFVSPEQAWTFEDLALRLVDPGSEPFTGFEAVYVRLWQGTPGPTGRLIAGDFETNRLIDTTFTGMYAVMRGEEQSDANPIKDALVDLTWLPPLGPGQYAIEVAAVGPGPNPVMLPPSPFDPTPQWQPAFIGFGGLEYEPLVTIDGRLASVPMLLFGDNGLGEPCRADLDGDGVLTLFDFLQFQNLFASGDPAADFDGDGALTLFDFLEFQNAFAEGCA

SEQ ID NO: 46 - protein, 112 aa, Unknown
  Environmental Sample
MHHHHHHGGSGEIVLAIIAVGIVAALVYVNREAKNFDINKDGKVDLEDAKAAVSNTIEAAKAAADVNKDGVVDAADAKVVVEKAKTEVKKAATKAKSAAKKATTRGRKPKAQ

SEQ ID NO: 47 - protein, 375 aa, Unknown
  Environmental Sample
MHHHHHHGGSGQVMTHRFGKNARVLFSALALLAVGSPAMANTLNQNVSWTIDRAGTTAKYRIVAYGDSIYAGYNGSISNAAKYSAPTVDAEYLAALWNADIESVRRAKSGAIASDVYQNKIVAERSYMQAASTRVVTFEMCGNDGLQARTSFKGQTGTCNYNVLSTAVNNCKANVAAAMDYINANAYSGVKLKVIANLYYPGYNADNVQSSCNDPVTGAKVNLRDKFLPAITQMNYWMCEYARQKGFKCVDSFAEYMGADYDSNGDGQIDSNALKYVPGESESSYVTRITSTLRPTLRDANTHFVSSTSSYDYIQSDDVHPTYTGGTVSAGLWGGTTGTGAARYTSFTGGRSPIWNLYGHERMGWSLSTHSPAAP

SEQ ID NO: 48 - protein, 546 aa, Unknown
  Environmental Sample
MHHHHHHGGSGRLARRVARQAALAAALACPIAALAAESNPEPRRPNFIVFFTDDHGWPDIGEQGVLQDLRTPHIDAMAGNGARCIAGYATAPQCVPSRGGLLTGIHQNRFGLELNPDPLDGFNAQQTIADRLREAGYVTGMAGKWHLGPPAEIGQHGFDLFHHKHSAEPGVGNFDPATGEPTPVGAKPTTTYHIDEVAQAATTFIDLHHEQPFFFYAAWRAPHVPLDATPELLARFPGEMPERRRQALAMISAMDDGVGDVLATLREHGLEDDTLIFFIGDNGAPLKMHKLDAPGGGPGWDGSLNDPLNGEKGMLSEGGIRVPYLVQWAGTIPPGTVFTHPVTTLDVGATLLAAAGLEQPAELDGANLLPHLRGDVATAPHEHLFWRWLGQAAIRSGQWKYLRAGDTYQYLFDIEADPEEKHNLLAQHPDIAADLLARLRAWSDELPTPGLPADVPPAYHDFFGFYFEGVEFPAPALPAQPAAAAPGAPDARTLFAQRDKDNDGRVTRDEWIAKRELSEAQMRVVLRNFEQRDKNNDGAWTLDEID

SEQ ID NO: 49 - protein, 429 aa, Unknown
  Environmental Sample
MHHHHHHGGSGTQISHKLRIGALLCLIITGFGVGMSQAAITFNITAGPTTLTMPDGAVIDAWGFALVSTDINGAVTLGQGIVKVPGDPLIVPPTETTVTINLTNNLPEPVSLTILGQVLTPAGGPVWTSGLNSSVSATGARNANDYVSRVRSFAHEAPAGGVATYTWNNFRAGTYLLQSGTNPAKQVQMGLYAAIKKDTAPGEAYPGVPYTRELILVYSEIDPIIHAAVTTGNFGPSGTITSSLHRDPKYFLINGMAFDSSQPGGGLDPVVFVDPFDKLLVRSINAGYEPHVPQLLNMYMKTVAEDGNPYIYPKHQYGFQLPAGKSIDAILEPTTDGRYSIHDAALHLTNNGAASPGGMLAYYGVSCVGDLDYSGTVNFEDLAILRANFFAECTLGTPCTGDINKDGFVNFTDMGLLRANFFRGGCPVP

SEQ ID NO: 50 - protein, 124 aa, Unknown
  Environmental Sample
MHHHHHHGGSGKRSNIMKNSTLNSMLAGSVFFLISAGSALAQETTAPEFQEVDANADGVLNASEANSALPALGLVDGNQDGVISKADVKKVLTDIDFAEDDQSAIGPSDYQQIVQIMEQMLNNA

SEQ ID NO: 51 - protein, 166 aa, Unknown
  Environmental Sample
MHHHHHHGGSGRQLRPNPGDKDMNKTLRNILGGGVLLACVGAGGVWALNANGLNLKPTAKETRRDLTAMNSTQLLDFSKNTYVMTDRNGAGFIVLYEAPKARATSKTNGVVTKTDSGPQVWMKRFDHNGDGKVSWNEYYDKVRFLAKNGKKRRPGDPDCPDCKPVV

SEQ ID NO: 52 - protein, 252 aa, Unknown
  Environmental Sample
MHHHHHHGGSGTTKFRLTAAAILLGTLGATGLAVADTGFGRGGPGMEREIDFTAIDTDGNGMLSREELVVRATERFAAADTSGDGNLDRAELAAQMPAPRGGFGNIFGPDRAQQRADRMLAMIGATEAGQAPIGDFAEQRVNMLLSFADEDRDAAISQAEADAIGQRAMGGHGPEGMQQMHGRMGHGMQDGAQGGMRGAMLQDGAPGQMPGGQMQGGGQQMQGRMPGAGMQDGAPCGTPGQMRGYGYGQGAN

SEQ ID NO: 53 - protein, 163 aa, Unknown
  Environmental Sample
MHHHHHHGGSGNRLILGAVGTLLLVGIGLFWWQGRAEVEQGAPPPLAEPPMPSDTLPEADALGMLGPAPPEATELTREQRRFFRYDRNRDLKITRREMLSTRVDAFRKLDKDGNNLLTFEEWAVATVERFEKSDLNRDQELTQAEFATTAPKPGAKKSCDCSP

SEQ ID NO: 54 - protein, 309 aa, Unknown
  Environmental Sample
MHHHHHHGGSGLVRLSRDGLNVSLPMLQLGLVAFAIHADRSMGSALALALLLISGLFGWFRSLRHARLIVDTPTSRIASAAQGYTELRGRGQPLHGTPLLSPLNGLPLLWYRLSTFRKTSDGKWRHVSTEDSDSTFLLDDGSGVCAVDPDGAEMLIRRKDVVERGELRQIQWSLLRHDPIYVLGEFSTLGSISPDLDTSRQVRELLAHWKQDQKTLLKRFDLDGDGTIDLKEWELARAQARREVVKQRDAALAAPEAHLMRKPASRLYLISDLDPRQIARRYTLWSVFHAAIFLGAAATLAWFGQIGVS

SEQ ID NO: 55 - protein, 313 aa, Unknown; identical to SEQ ID NO: 12
  Environmental Sample

SEQ ID NO: 56 - protein, 191 aa, Unknown
  Environmental Sample
MHHHHHHGGSGKKTLLAAGGALALAAAIPLVALAEGGWRGGSGGHHGGMMSGGDGSGHHGRHGGHGGKAGILELIDIYDADGDGKVTQAEVDAFRAERLKKFDADGDGQLSLAEYEALWLDAMRERMVRAFQRHDVDGDGQVTIDEFGRNYRHMVILRDRNDDGAIDLEDAGPRGPRGEGRGMGRRMMQQP

SEQ ID NO: 57 - protein, 132 aa, Unknown
  Environmental Sample
MHHHHHHGGSGRQNLRRERTLFLLFLGASFVALMAALPIVTAQQTQATPKSEEMQKSSAAAGSSAPASPASSTSDAPSFEQADRNKDGFVDKSESGVVPGLSANFERADRSRDGKLDREEFAKGIQILQVRR

SEQ ID NO: 58 - protein, 650 aa, Unknown
  Environmental Sample
MHHHHHHGGSGSETQLLIARKVATEPAELPAVLRRLQQKIGLDPYTTRQRLLGRGLALLAKGRPDQLDTLAGELTPLGLNLVRLTPTPPRFEPQRLTALRRSADAIHFALGEKQLSLQRGEAVVAILAELSGALIEKSLKQLMVQNAYRGADAVEPISDQEVYRAILRAKPVLDLYLLGNDGKPRGAVRVFPGRYDPKGLGERMSYSGAGNLEALLELVRELAGQFTLHSNFGLDLLPGCKLKTGGNELPFSQDNLASLTRYGWLMLDLAAATPQPTPTPTPASLLAATGVAELVELAGELAEKDPSPPSASKKPDLPPPPELAEDTPGALRRLLSFGATAFGGIIYLALEGPGLLFGFFKYGFGSGVLPAVAAGLCGWGGFYFLRLKRTMENTPTSRARSLAMGMVEIQGRAVRRYAVVSPMTHLACVYWRLQKFRRDQNDQWKSVGVSSSGPVPFELEDGTGRITIDPRGASIRCRQRQEGFPGQMSLLFSGSGSSDMQEKWVEEVLCEGASLYVLGFASAPSSQGSSLRERTLERLRQLKTDPQALSQYDSDGDGHISQAEWDAARQAEEERALHESLQPRQNSSHGRVRPQIGRPPQRGLPFLIAESASEAHLSRNYAWYAGPLLIAGLGFAVWTLWVWTGFFFPA

SEQ ID NO: 59 - protein, 300 aa, Unknown
  Environmental Sample
MHHHHHHGGSGDFLSENKRGFTLVELMVVVAISGLVAIAIMGAYKAQKRIMGAQEVVTDIQENVRTAIFTLTQDIRMAGYDPTLSGGFGITYVGFRDLGDANAVGGNSAFQFTADYNRDGVVDGNERVTFSLYDFGDDQGVIGTMTDLGRNTGGGRQLLAQNIQAIGLAYAYDVDNNKALDTYTTTAGTQQVIWAIDSDNDGTLDRRLDTNGDGAITNADGPGAGINELIVGAAIATPVAMADVRAVRIWLLAAENAAEHTEYYDPNTYVVGRQIVSPRDNLRRRLVETTVQCKNMGLNE

SEQ ID NO: 60 - protein, 240 aa, Unknown
  Environmental Sample
MHHHHHHGGSGRFRTVIGVLASVATVGSSASAVVINPGQTSVLIGTNSVQSPWLSVPSPGAVRVRFFVLGPPFTAIYSGDLLISLGSTVPLSEPVLVYRLENTWAEDATRRVTSISFTGYKEIRIDADFRTDLGGTDEPKRVRRSADGDTLTFEFETPIPGNVAVTKFVFGYTNGAMLAFDGTATILLQTGESVTIEGLPRPSHGVAPTLPSCEGDTNGDGVVNFSDLNGVLTNFGEECP

SEQ ID NO: 61 - protein, 991 aa, Unknown
  Environmental Sample
MHHHHHHGGSGAESNDIAESNNTERPSSEKQIGPYRLLEPLGQGGMATVFIAEHTKLRKPVALKLVRFPKHQIDARARFEREILAIGKLHHPSIVSATDAGQDGDLQYLVMELVRGLDLSRIVRRLPTLSVPDVCEIGRQTAIALAYAHAQGFVHRDIKPSNIILDEHGSIKVLDFGLVMFDQWDSAISELTTVGQFLGTLDYIAPEQAERSGGVDHRADLYALGATLFRLLCGRGPLSVSPNMTPFAKLRLLANHVPPKLQELRPDAPASLCDLVNRLLQTSPTDRPESAEHVAAELAPMCGDANLSVLIQTAMSTEEQASFEPPDSRIAPWSKPSDSRTPSSDPGKKAKADSSKLSAGRGNRFTNWSKWVLSALAGFVLYGVIIRWETKEGQLVVESDLSEGDIKLRRIDDGSEQNLKIETGNTVTKLRAGEYQLELASSSDNISIENGSFVIASGQTVIARVRLEPSTPIVPDSSRGSQEEDSVEPLYDGLPLSELLKLVRREKSHEKWKVGVIGATALLKDQADQELFEELYGTLREREEFELMAQWRDPRIDTAIVDELKATPIAERAALLRKLTSHFDLKFLPKTIEWVSQQHDENATDAQELFLAMLNIRLNETSDGLRELRIPSNALSVFSRFAAMESLKPSLAHLYDDLAVECTDTNETKSTSYLGDYDKRAAVRLLTGNHGSFGSRVWAIHRCIQSRNPKLLDLAGQKISSLLAEVPDEIGSKYAYSTRIPISNTGGPFTDLPAYQLAKLASSVSPGWKSEPSFFRTVVTLWPSARDAWEFYASNERSAGQIKNKIDQRWAPIDPLRLRSDSMMDMGNIDVAESYAQDRVLVFLLTIMSAHADRTVSERDLADFVKWCDFASRFGSDDITTAKLSEEQVEAIKQELNVNSLPDMLNLKYFISLSHPQGLSLTTSSATSSAVDARMREWVKQKINPFDLNRDGRLDPVELRNYDSNLQMSDVDTNGDGVADVDELVRIRTRR

SEQ ID NO: 62 - protein, 161 aa, Unknown
  Environmental Sample
MHHHHHHGGSGIIGVVGGLGMAGIGMFWWQGRAAVESNAPPPPVAEAPAPDPEDLPVTDPGDMQGPTPPEVSDLTREQQRFYRYDRNRDGIITRNEMLSTRTDAFRALDVDGNNLLTFEEWAVTTVRRFENADADGDERLTPREFATTAPKPAAKKPACKC

SEQ ID NO: 63 - protein, 797 aa, Unknown
  Environmental Sample
MHHHHHHGGSGSGRQFKMAIFCFCVFSGFLFAGKSPEITPVPQAALKTIISNCSPVEMDYDPHRVGQTAHNTQLITAQTGQFSQIHNDVLPRSLPVAKRQRSVSLNSDIGDPDTMAPGDELMLELFEDAFYAAVVDRVNTNVNGTVSIRARIANHPLGYALFSTTHGQTLGSIRIPEQNRHFRIEFNQNRRIHLLAEMDSHVIDKIESGPPLVPPYPQAETATVAPDVLSEPLQTADIANVDVMIVYTPAAQDWAGGQTAITNIIAQAMEKAQLALDNSSTQMTMTLVHSRLINYTESGDSSTDLRRLTWTYDQWAGYMDEVHDWRNECGADLVALFAEVSDVGGTGWLLNDINGRPSYGFSLTRVQQASWTYTLIHEMGHNMGAHHHKHQNYQAGPTDWWNWSANQWSAGWRWTGNDNQYYCSVMTYESGNYFADGQTHTRVAYFSNPSIYHQGAATGNSADGDNARTIREIRQVVAGYRTITNHGSLQVTLLPEAAVLDGAQWRRTGTIQWYNSGDIETEIPAGNCTIEFKECLGWIAPDPNTLTIQKDQTAQVAATYIESNEIIIGSGQSTWNYPLSTYYEDARTQTIYLSEELGGASTFVSLGLNVTELPGPMNYFTIRLKHTNMDAYGSQPAWESVGWTTVYQSDEVVTAAGWVTFKFAAPFTYNGSQNLLVDISFNNNEWTHDGFCISSSDGTTRSLFFRTDSNYGDPLYWAQTPQPGSSTNFPNIKLGIGLTSDLNGDGVVNIADLALFSLNWLNTACASPDWCGNADINHSGTVNFNDFAIFATQWLNQ

SEQ ID NO: 64 - protein, 566 aa, Unknown
  Environmental Sample
MHHHHHHGGSGERALASADVACIVYSVASSQSFHRLGTFWLPLVRAQRPGLSVVLVGNKIDTRGDDVTNEELEDEILPLMSDFKEIETCVECSAKTLVNVAEAFYFAQKAVLHPTGPLYDSREHELRPEAVRALERIFRLCDRDADGILSDEELNAFQVKCFRTPLQEAELESIKEILKEVEPRGVQRDGVSLPGFLALHRLFIQRGRLETTWSALRAFGYTDELQLKDELLHPELDLKKNAVMVLGPMANDFLTRLFHAWDHDGRGSLTAAQLEELFMPMVLGGGLEWYHGLMEASLTDGSGALTLTGFLGQWALMALLDPHLVLTSLALLGLDDPSAGVNVVCNGLRRDRANRRQRDAFLVWVLGATGSGKTALRRSLLQRPFASSYVPSMEAHLAINSVPVEGRERFLVLEEIPTHGALDREALADAERLAHVDAICLAYDESDPASFTHIQQLYEEQKKVLIGIPVLLLATKSDRPHTQSTVDAEWIHSHGLPEPIHVSAKEMSQEEMTTRLWAPLLRAAMAGDQKKRNTWLLPVLGATCAIGATAAVAYYYLRLRKEEKSD

SEQ ID NO: 65 - protein, 312 aa, Unknown
  Environmental Sample
MHHHHHHGGSGLRTGWPAGLQHDTVNFVLSGGNLLILLLGFRIGTPLGWSLSFALVGLTSFWAWYANLKRYRTVADTPTSRIASAPQGYVEIVGRGKQPPGEKLVSPVSGLPCLWFRYRIERRNGDRWEHVESGVSHDTFGVDDGSGMLLVDPEGAEIRTSRKQVSTQGGYRRTEWTLIEGETLYAIGEHVTLGGPSAVLDKRADLAKLLAEWKTDKQALLARFDRDRDGEISLEEWEAARKAASDEVDRAHLDIRLADGIHLLRKPAHGRPFLIANREVAALVRHFRLWSWAHLAIMAGAVSGLMLLPRLA

SEQ ID NO: 66 - protein, 769 aa, Unknown
  Environmental Sample
MHHHHHHGGSGVVALLLAASAAQTSFAQGALGLSRYDGHRVVRVDLLDEKQVEFMRALDADLWTHGEGVGTKEYRVTPAQLDRLRASGIAFEVTVDNVQALIDAERASILAPRGLLGYFESYQRYEDMKQFADDLALNNPDLVSRVTVGQSLEGREIFAVRVGATSQQGEKPAIVFSAMQHAREWVAGATALYLANELAEGYGVDPRITAALDAVDVYIAPVINPDGYVWTWDVERLWRKNRRNNGNGTMGVDLNRNFSVGWGLNGGSSATSSSDTFRGVAPFSEPESTALSNFIASIPSARAHVDLHSFSELILSPWGWTEDPTDDAAAFDVLNDALQDAIAGVNGRVYTAGPAGSTLYIASGTAPDWSYGDRGIFGWTIELRPASSAQGGFILPPDQIIPTGDEILPALLELAEFASEDVFFYGLREPGYVDSANGAEVVLGATIAPAATLDAAQRALRYRVGDSGPFQSAPLTFGAMNEVRGTLPGGPCAQVFQYYIEIATDNGVALFPEGGASAPLTATVFDANVAFDDDFATDLGWGVGAPSDAATTGEWTRGVPNATNFQPGSGDPNGSGAECFYTGFSPPGAIDGSEDIDGGATTLTSPVFDATQGDGDGDAALSYSRWLGSNGVPGNDYLRTFLSNNNGATWVEVDVLFEDIRRWERREIRIADFMTPTSQMRVRFVAADAGSPSVAEAAVDDVRIITLGCASVPGDTNGDGVVNFVDLNAVLSSFGSSGAPGFAPGDVDADGDVDFADLNTVLSNFGAMN

SEQ ID NO: 67 - protein, 200 aa, Unknown
  Environmental Sample
MHHHHHHGGSGFACTSSCCGASCPIVVDVTGNGFHLTDMAHGVYFDFNNDGRNETTSWAARGSDDAILVLDRNGNGTIDAGRELFGNAAPQPSSSDPNGFIALAEYDKRANGGNGDGRINRRDAIFVSLRLWQDSNHNGISEPAELHTLSSLGIEAMDLDYKISRRTDEYGNRFKYRAKVYDSHGTNAGRWAWDVFFVSH

SEQ ID NO: 68 - protein, 226 aa, Unknown; identical to SEQ ID NO: 35
  Environmental Sample

SEQ ID NO: 69 - protein, 705 aa, Unknown
  Environmental Sample
MHHHHHHGGSGHRCRIPLHVIVGLGLTGPALAQAPNGILQGFQRLDANGDGWVNRDELDVFPRLKSRLAGADADRDGLLSLEEFRRGMLATAETAPAGQPEPGRLTPGDHTRAVKVGDVVRRYRAHVPASYDPDRPTPVVIAFHGGGGNPESMVRLSGLNAKAGEAGFVVLYPYGSGPDPERGLSFNGGECCGHAMVEQVDDVGFTRAMLDDWASVANLDADRVFATGLSNGGIMAHQVASELSERIAAIAPVGGPLMMPAPRASRPVPVMHFHGTADAFAPFNGGYGRGATGGRGVTDFRSVEHTIQAWVKHNGCQPAPRIETLPDKADDGMTVTRRVWSGGEQGSEVVLIEIVGGGHTWPGMQPLVAALGESTRDVSANDLMWEFFQRHPRRHGTEASSLSQPDAGTSAIDPGSPRGAKAQHVWVLPEVQAPRLQRVVWDSQTAGQPVSCYVFTPAAYEVEPERRFPVLYWLHGSGGSMPAAAAQLAQRYDAAMQAGRIPPMLMVFPNGLPMGMWCDWKDGSVKLETLFFEELIPHIDRSFRTQARREGRLLEGFSMGGYGAARLGFKRPQMFAAVSLFGAGPLQLDFTEAPRAGPRGRDRVLGTVYGGDMAYYQAQSPWRLAEQNAEQLRTGMAIRQVIGDRDETLRFNRDFKQHLDALQIPHSYRQLPGIPHDPNLVLDALGEAHWAFYRQVLGKVPGSEP

SEQ ID NO: 70 - protein, 621 aa, Unknown
  Environmental Sample
MHHHHHHGGSGRAARASAAIALLCLTTSQLTAQRESGPGGWVRRMDGIPVRDSAGQALAAPWLGGFNLPRPQLVDLDNSGRVDLFVQETRDQLMHFTRDDGGWRLQDDQFQELPVGEWFRFADLNGDGRIDLLAESPTGYIRAWRNDSTAEGTRFTPVVDSLRDVHGQPIFADPQNILTVVDIDCNGRLDLFIGRVAGYIDRYEQVGRDAHGFPIFDLFEERWQDIEVLGPIPGQTTPFEGAPTMRHGANTMAFGDIDGDGDLDLFWGDFFEAGLLLIRNDGTSCARPSLRGPHERFPLGAELLTSGYNAPSLGDIDGDGRLDLVMGVIGGAYQPARTAIDNLYLLTQPAADSFHLVTRRLITMIDVGSESVPALADLDGDGDTDLLLANKIAPGEDSTATITWFENIGTATAPVLADRGLLPIRGSFHWAPAVVDLDGDGLLDLVLGTWTDRVQWWRNVGTRTAPSWQLADTALVTLTRGSNTTPTLADLDGDGLLDMIVGEASGQLNLYRNVGTAQAPSFDLVSDNFGDIDVGRRSAPLLADLEGRGRADLLVGAEDGTVRLWRRVGDPGEIRFVADPDFLLVGDQNATPALGSLFGAGSIDLLLGGSGGGLRWFHRAP

SEQ ID NO: 71 - protein, 185 aa, Unknown
  Environmental Sample
MHHHHHHGGSGKTIPCILLAILAGGAAMAEEAKPKPERGERKIPPALLKEFDKDADGKLSPEERDVMRAAMEERRKARQEAMLKRFDADGNGELSPEERKTGFETIRKEMLEKYDANKDGKLDPEERKTMAEAERDNPLAPPAMGGPDGPRGKGGHGGPRGKGGPGGKRGPGGPAGPGPDAPPAE

SEQ ID NO: 72 - protein, 310 aa, Unknown
  Environmental Sample
MHHHHHHGGSGLVRLRRDAANIALPAAQLAIVAAALATDTAWGTLAAVAMLMGTGLWGWLRSLRHARLILDTPTSRIASAAQGYTELRGRGRPLAGTPLLSPVNGLPVLWYRLVTHRKQSDGKWRLIDRHESDASFVLDDGSGHCAVDPEGAEMLVRRRDVFNRGDVRHTQWSLIAGDRLYVIGDFATLGSIAPEFDGAAQVRELLAAWKADRRELLARFDLDGNGEIDIREWELARAQAKREVRRQRRAVLSAPEAHVMRRPALRRLYLISDLDPARLAARYRLWAGFHLAVFLGSAGAAAWFEQIGLF

SEQ ID NO: 73 - protein, 287 aa, Unknown
  Environmental Sample
MHHHHHHGGSGGLAGGGAIALTVALSGVVAAATVLSALSAPAPTAPVVDTSKTFEDLDGNGVDDDCQTDAVVADPVAAASAEAAVDLNGDGTISVSEAAQSDRTGGVNCNHGGYVSGVAHGSCTDAPAPADTTTDPTAGTGTADGDTEDGDSADDTGTTEGTEPADAPESGTTCADTTQATDAPTTCDTSTTDGTTTDGTTATTDAPTTDVTTPTDVSPNAHGKAVAAVAQSDAVGGKNCNHGGAVSEVAKNHDARDAAKAAREAAREARRAAREAARSAKHHGRPG

SEQ ID NO: 74 - protein, 113 aa, Unknown
  Environmental Sample
MHHHHHHGGSGNTQTFPSTLLALSLTVALGTMATSTGARAEQDPSGLSAFDKNKDGMISKEEYMSTGGTDKTFDMYDLNGDGKLDKTEFGKAKGGETGAPKGGEPGGAPMPTR

SEQ ID NO: 75 - protein, 480 aa, Unknown
  Environmental Sample
MHHHHHHGGSGTHKTLVAGPMLAIVGLTITTPWALAQCEPAWDPAIGNPGVSTGFVQPMRPWDDGTGTRLYAGGSFNSIGGASGSTILGQWDRDTNTWSRVGTPGLSTGSTNGFVTQIVPFEVFGQERLVVAGFFANAGALAGTQSIAAWDGSAWVSMGAQLVAPNAFWGSDVGDLGEGPRLFMGGSFPTIAGVPAGGLAQWDGDSWDAIGTGVGISGAGSPNVFGLKLFDDGSGLALYAGGRFSAIDGAANTDLIARFREGAWEAVGTGLGASSPTADAGVMEVFDDGTGPALYAAGRSLVAPGQPTASVYKWDGSAWTAVGQALGGAVTDLLVWDDGTGPALYLAGTAMPGIRYIARLEAGQWATVDGGIEPEPSVSGSGFASAFGLAVWDNDLYIGGSFTLVGDPMVGVRGIIRRTGCGSAPCFADFDGDGELTLFDFLGFQNAFGTGDLAADCDGDGELTLFDFLCFQNAFAAGCG

SEQ ID NO: 76 - protein, 172 aa, Unknown
  Environmental Sample
MHHHHHHGGSGGRKNHILRPIFAPFDPENGNIRFSTVGSSIGVGSMKNMKLYVLGTVLVSALSVPVSVRAEDVAGKAANDAMKRPPAGERMIEALDTDKSGDVSLEEFQAKHAEQFKTMDANNDGKLTKDEIGKAHEARKAKMKEHMQEKRERLKDKAEKETAPAEEAPKAE

SEQ ID NO: 77 - protein, 584 aa, Unknown
  Environmental Sample
MHHHHHHGGSGKNKTSLFLSNPKKNFLRSYSRAFKQNIKIKVLLFLIICFCIVGITSTKVTSQDEEEIIVHKKYPSEPVELVSIKTERNQISFEQPFARSEEWYKGLQFEIKNISKKNISFISIDLIFRRPKGITPSRSDFSTLPYGIVLPFGEKNVSLAEGKSSIQIKPNRTSVLQVAEAYYHTLKDDLKDLGYPNGFKGVEVEIREIGFSDGTFWARGIWYKPDPQNPNKLVEDKNIKVDTKISSLNPEGLVCGTRRIDFSPDYCYQPLDCQVDTEHIDEGLPTLFAEEYIIRGCTIRSGPMQGWGCGEQRATTRVIACPTPTPTPTPTPAPTPTPQSGGCNGRPDFRQYPSGCAPGFTANGGTCTRSPSFIDQCDLFGGYDFDSCGCFGFCDPSIGGCSPVVVDILGNGFAMTSASGGVMFDLQGSGTARQFSWIAADSDEAWLALDRNNNGAIDSGRELFGNVTPQPPPPDGAEMNGFLALAQYDTAGFGGNGDGKISQQDAIFSRLRLWQDANHNGVSESCELFTLPELGLRKIDLDYRESRRVDQHGNQFRYRAKVKDAQDAQLGRWAWDVFLVVGNE

SEQ ID NO: 78 - protein, 304 aa, Unknown; identical to SEQ ID NO: 31
  Environmental Sample

SEQ ID NO: 79 - protein, 134 aa, Unknown
  Environmental Sample
MHHHHHHGGSGNVNSFKQISYKKNIGAVLALFMVLSGTPVFAQTEGGRGPAPGLRANPNPSNSARNPGNFRNYQDRGNRQNNDRIRADRNEDGRVDRKERHQAREVREDQWMKRHPQAADRLDANKDGDIERSD

SEQ ID NO: 80 - protein, 145 aa, Unknown
  Environmental Sample
MHHHHHHGGSGLQHKKSTAIIAFGVLFIFTLSTAPVIAHGPGHDDNDNHCEHCEKKITKMDSDGDGKVSRREFMKFHGDKFDKHDLNNDRFLDADEIHYMMEDMHKQMREHMHDDDHKHDNNHENGHSHDNDNDNHSHEHNHDHD

SEQ ID NO: 81 - protein, 211 aa, Unknown
  Environmental Sample
MHHHHHHGGSGSPRSAKQFNEIRIQKKQLIMETALELFSENGFHATSMSQIAKKAGISKGLAYNYFQSKNEILADILETSSNEIYENIDINHDGILTEEEFYYFIKKTFQLINSNRRFWKLYTSVILQTNILDEKNKSMAEKLSPVFNLFRNFLISKGSKDPDGDLIVISTLLKGASIIMISTEFYSYEILEEKIISAVQRIILYNKETEK

SEQ ID NO: 82 - protein, 206 aa, Unknown
  Environmental Sample
MHHHHHHGGSGTSISSPVSGASAYSTSLCYLDTNGDGVVSADEVATVSESKRTQDPTVENENAATGVSSQVTGGVMAMLLAGSEDGGFEEKPSPKELFAAIDADGDGSVTQAEYVAARPGDMSEEDAAALFAELDPEGTGSLSESQFVTAMEANRTVGISSAAEDEDGDTVSLLDVLAEMQSVIAAYQANAAGDIDDTETTVRATV

SEQ ID NO: 83 - protein, 258 aa, Unknown; identical to SEQ ID NO: 17
  Environmental Sample

SEQ ID NO: 84 - protein, 149 aa, Unknown
  Environmental Sample
MHHHHHHGGSGIRSLLAAGIAASLILPAAAQGANAGRMIERLREADGNGDGAVTRAEYSAWRLQQFARMDRDGDGYVTQAEIDRIARFAPAGFEGDRMVSMFDKDGDGRVSAREFADGPAPAFVRVDANGDGVVTEVEITSAIALLKAR

SEQ ID NO: 85 - protein, 204 aa, Unknown
  Environmental Sample
MHHHHHHGGSGLPPVRQAGAVRQNRRSEEMHVMLRNLMLGATTLALTASLAGVPTAARAQTAAPAAEAPSGASAGQGAMGQGAMMGRGMMGQGCPMGEAMGQGCPMMGQGMGPGMGQGGMMGGRGPGAGMGPGDGGMRGPNMMRLMFALMDADGDGALSMQEFQAAHERIFNAADGDDDGSLTMEEMQGFMHGSGKPARKMRGR

SEQ ID NO: 86 - protein, 465 aa, Unknown
  Environmental Sample
MHHHHHHGGSGSLQQRVCVAGILAVLSVTGSNAAPDQATGDPCKPAWVPTFAGPLGLDSTAGAFTIFDDGSGPALYVGGGFTTAGGVTVNHIAKWDGSSWSPLGEGMNADVFALTVFDDGTGPELYAGGFFTTAGGVPANRVATWNGSTWTSLGEGVDGVSSFWVYDFAAFDDGSGPALYVGGNFDTAGGLPASSIARWDGKTWSPVGGGVSGGTGGEIRALTVYDDGSGPALYAGGSFTLAGEATVNRVAKWDGNAWSSLAGGMNERVRALAVFDDGSGAALYAGGDFIQAGGVAASKIAKWNGNAWSSLGGATTNVVRTFGVFDDGSGDTLYAGGGFDMIGGASANGIAKWEGSTWTALGSGIVGYVGALAGFDDALVVGGFFTFAGGQPANRIAEWRGCAASAPCAGDTNGDGVVNFTDLNAVLTSFGQSVPPGTGGDVNDDGVVDFSDLNEVLANFGVECR

SEQ ID NO: 87 - protein, 219 aa, Unknown
  Environmental Sample
MHHHHHHGGSGEGVWGREGRVPTTRQRLPVFRATFSPRSLLDLDQGTERYEVPSLGLSTASKVEAIVAIRLPAFVAATGLTDPSLVARYLEADLNGSGKLSFDELKIFQGKTYREFKYGANETALRPDEFLRAMGGDCEDFALYTAGLLRFWGWEPYLGSLGSARGGVGHAVCLSYEEGSFSSGYTYFEVESGTTEDGAGLKPGTDVPIDYDHVGGLRM

SEQ ID NO: 88 - protein, 358 aa, Unknown
  Environmental Sample
MHHHHHHGGSGIELDMLAYIKSLFGDVDGDGEVTLMDVVAIAANAGAASGSLPGPLQGDLNQDGVVDASDVLAAYSALGSTVPFTQEDAWFLWNQIVFEGVAAGYDPSIDEILIDPLRGMVGGHRGPNDHNQQITGTWPPIPGYPPGEWNWPSDHLGTVSQSWGNRPGQSTWPANHFGSVSATRENATNREDYWPPNHDVTRSGLWNTDGLHQSLTSSQWPAGHLRDRSIAGQDSDQHVQVISNVNQGNNTDTSELAGWPPNHIAPVSRTWTPDHERDRSAMWPANHLMTISQSWTNPNSGWPANHYEVISVTWSQPGDHSTRVSILFHPANPFRLPDLFRQSATPDDMINLLGFEPR

SEQ ID NO: 89 - protein, 115 aa, Unknown
  Environmental Sample
MHHHHHHGGSGQKKLCQDSKYNKYDADRDGTVNDEEINNAQEMLELELREEKADAHRRMAWVAIISMIIFTAVLFSPIVSESRVAALADLLGLFYIAQASIVGAFMGVTAWMSRK

SEQ ID NO: 90 - protein, 295 aa, Unknown
  Environmental Sample
MHHHHHHGGSGQRNTHRKHQGETSMNRLAWTLLTLATATPAFAQILVYDENSINQHALRAAERVRPGEVTRARQTDFNTLLARGGWEVVVMDFPSIRPDGGTAAFAEFVNAGGRAVLSTWFSVYDDVLFNAFGAAGGEDMFFFDEPMESAGTPLADRVFEGVPMPWFDWLNAWFSDGAAFTTLPGTEPLAFVAPFTNPIMIYANEGRTIAAPVLDEMDGSTEAERIWENMMNLVLEAGQDCPADIDGDGQLTIFDFLEFQNLFAAMDPRADFDGDGSLTIFDFLEFQNAFAQGCE

SEQ ID NO: 91 - protein, 124 aa, Unknown
  Environmental Sample
MHHHHHHGGSGHWPVALTGFFATQGGHMTQAQHTHRFDARSLLLLGALTLASGAGWAQGNPAPDDASSQALVAAFAKADRDGDGKLSTAEAAQLPAVAERFAQLDKDGDGALSRTEFMTGLQSN

SEQ ID NO: 92 - protein, 115 aa, Unknown
  Environmental Sample
MHHHHHHGGSGKPLNLATALVTTTLCAIGLATGALASDPAGGATTDPVERYRAIFAQLDTDGSQSLSEEEAASAGLQGESFARLDSNGDRTLVLEEFLALAAEAESPSVIPTPDT

SEQ ID NO: 93 - protein, 267 aa, Unknown
  Environmental Sample
MHHHHHHGGSGIDALSPSPPPGQSRQPSADPSTEASLRQSRDYQILRRTLRIEDQPPEPLARPDSEPSEDSLTVPTTTEVARFEQVLQQRELSVQIGAPSQAQPQLSDPLTLDLAGDGFTTRGLQRAVLFDLNADGRLDQVSMPDRYDALLALDRNGNGRIDDGKELFGDQNGAANGFAELARHDDNGDGRIDASDAIYRQLTLLRFDEQGRQQVRSLADAGVSAIRLQARDVDLALGAYDRVAQLSSFEFEDGRQGQAADLLLAHR

SEQ ID NO: 94 - protein, 204 aa, Unknown
  Environmental Sample
MHHHHHHGGSGQRSLAFAALVPALALSSVAQAQAWTQFQFGGVGSVTTFGINVTDAFPTLQITDAFLSGDQFAVRVLMGGSVVSEFDTSVPTSQGDSAIDFDMAFADDRWSSGEQFLSARGTMTVEVTVTLSPFGAGGAGWRLVEGEPPCRADIDGDGQLTLFDFLEFQNLFAALDLRADFDGDGQLTLFDFLEFQNEFAAGCE

SEQ ID NO: 95 - protein, 351 aa, Unknown
  Environmental Sample
MHHHHHHGGSGNNDRKLDLVVTCGRARSITVLEGKGNGQFGTALSNTTLAQPPGEIAIGDLNGDGKLDVVVASHDSYGLTLLTGDGKGGLAVAPASPIVMRLGEHPHTHGLAVVDINRDSKPDLITCNSTDNDISIAFGDGRGNFTRAPQSYPVGPSPYPFAVGDVNNDGWPDIVATNTATGPLRRQQLPFSRALTLLLSDGKGGFSPRQLPIRTSEPWFAAIADLNRDGKADIVATHHEQSALTVMIGDGRGAFTEANGSPFDFGVAVYHLIIADLDRDAAMDVVATTGNNIRALLGDGRGAFKPAASVPVGPGAWRMAAADLNNDGAIDLVTSNSDSNSVSVLLGASKR

SEQ ID NO: 96 - protein, 110 aa, Unknown
  Environmental Sample
MHHHHHHGGSGGSGQQARVDESAGRLRGYAWGENIGWINLDDAQVFVGFAAQCPGDTNGDGVVNFTDLNAVLSTFGISGAPGFTGADLNGDGVVNFTDLNIVLSNFGNAC

SEQ ID NO: 97 - protein, 113 aa, Unknown
  Environmental Sample
MHHHHHHGGSGEILLAIVVVVVVGALIYFNRSSKSLDVNNDGKVDAADVKAAVQNVVEGVTATVDVNKDGKIDAADVKIVTQKVKTQVKKAAVKAKTAANKASTRKPRQPKAK

SEQ ID NO: 98 - protein, 571 aa, Unknown
  Environmental Sample
MHHHHHHGGSGPKHTSRIFFPALLAALIFVMHCMLPPVGSAQTGRIAFLPFKANAPQDMSYLTNGIRDMLASRLASEVGLTVIDKTTVDKALTSSGTPTQTEAFIKLAKTLQADYIVAGSLTSLGTSLSLDAKFIDVAKGEPRNFYATAKTESEIIQSIDSLAWDISEKVFAHKRPATALVQPQAPGQPGAQAQPQYATAHPDRAFAGRTGAGGGSPFIYPKGITSEFQKTQNMKLSLQFMEMADLDGDGKEEVIFADIDAVQIFKRDNNRLSKVGQIPGKVGYRIHAITVADLNKNGKPEIYVSAADSKQPHSFAFEWLGTDKANYLFQDQRWYVRAMPIPGEGMVLAGQRAASDKAVSPGINRLELISGELKAGSPIEVPANVNLFEFTIADLDNDGSREIIAIDEYDRLRVLRSSGTVLWKSDEFYGGTTRFIGGTDAFGAARTSNLESSTRIYIPSRIIAYDVNGDGQQDIIINKNLSTSSRLFENMKNYPSGEIHALSWNGLALSELWRTRKIDGYIVDYLLRPNADKKSAELLVGLIVSSSSLDMFADQTSTMLIYQLDFTKKAE

SEQ ID NO: 99 - protein, 281 aa, Unknown
  Environmental Sample
MHHHHHHGGSGGPIEMTAELENIMKRFPLALAAALVLPAVLGLAVAAHAASDAPAAPRAGFSGPYAGYGMGPGMGMGPGGTGWQSMGPGARSGAWRGAYWADADRDGTLTVEEVKSFLEVRHNRPGFENLKVGAVEEKDDATLTAEIVTAEGALVRTLEFPRKVDAGVTAPRGRGGHGPAMRGGRGGWGQGYGPARSAKFDGRGFGPGMRAGLLADGELSVDEVKGLMDRHLAMWNNPNLKVGDVKEKDAAIISAEIVTKDGSLVESLEFDRKTGFRVFPR

SEQ ID NO: 100 - protein, 889 aa, Unknown
  Environmental Sample
MHHHHHHGGSGRTLARAFVPSMTAASLFIACGHAAAAPLRTAMADAQALTATGLSGMAQSVQVEDRSGVLSQAEAVLNDGQRLRFVMRNQIIVKTESGQALRAAVDSMASRYPGLTVDFPIAGGQYWAVSAKDVGTAMSAAEALNRLLFVDWAMVDRSTPSRPGNQNPNAGIQQIMLERAAMAKQAPGVAWPPSGGQRGGLDPQVPNQWHLGNALNFGRDNNIIPVFDDGVTGNGIVMSLSNVERRRFDNAHRDLVDRFLPDLSDTPNQFVGPDAFDTLYAGLMVATAGNGFDGQGVAPGAQIAALIRGTPLLEAAAYEQKNIPVRFHPMRVTTAPFDAYGFGVPDDRYNGANFYRFVQDALLNSQFFGRDRKGVVHIFNNGTNSSFPFPPDFGGGGWDDILAGNEVAVSVTNGYTVGPNYYGSMVHYYPPANNRATLIIQTVDEDGVADLFGTLGSGIFASVYGSTAQSTITTRLTPSTLPGDAFGTLNQGITTAGGNNATGGAIAAGIVALMLEVNPSLSIRDIQHILRRAARVDPLNFDPQEEYFRIDRIGPYQLGAAIPSHWQVNAANIRHSDQHGFGVIDAEEAVNLARTWRNVPRPIVLDTTLVNTEGLSVPDATFIETSDTTASAIPGTPVPIPFCVRDNISIEAIEVEMTISGVGNNDLMIWLVSPYGTHTNLHYPTSNNQIGTTDDLNPLDDDSDLAFQGTNGFAFFQHNFTTFKHWGELSGGRWFLNIQDRGPDEQLSEGTEPTDDDPGEDFVTTFGPLMVPNFPGRSEKTIESYRIKIWGTATTEAPFLGCNPTETSCPGDVNADGVVNAEDLAIFMTWYTTGDLRADVNRDGVLNFADILLFRQLWVPGFCQQNGFPFGRPTSPPSTGPDTPTVRPI

SEQ ID NO: 101 - protein, 429 aa, Unknown
  Environmental Sample
MHHHHHHGGSGTQISHKLRIGALLCLIITGFGVGMSQAAITFNITAGPTTLTMPDGAVIDAWGFALVSTDINGAVTLGQGIVKVPGDPLIVPPTETTVTINLTNNLPEPVSLTILGQVLTPAGGPVWTSGLNSSVSATGARNANDYVSRVRSFAHEAPAGGVATYTWNNFRAGTYLLQSGTNPAKQVQMGLYAAIKKDTAPGEAYPGVPYTRELILVYSEIDPIIHAAVTTGNYGPSGTITSSLHRDPKYFLINGMAFDSSQPGGGLDPVVFVDPFDKLLVRSINAGYETHVPQLLNMYMKTVAEDGNPYIYPKHQYGFQLPAGKSIDAILEPTTDGRYSIHDAALHLTNNGAASPGGMLAYYGVSCVGDLDYSGTVNFEDLAILRANFFAECTLGTPCTGDINKDGFVNFTDMGLLRANFFRGGCPVP

SEQ ID NO: 102 - protein, 395 aa, Unknown
  Environmental Sample
MHHHHHHGGSGSMIYLDNSATSFPKPEVVYQFMCDFYRTHGVSPGRSGFDAAIETEEMVHATRKLLTDFFNGDDPNRLTFSYNASDSLNIIIQGLAEPGDHVITTCLEHNSVLRPLHHLELSGMIEVTYIPFNGDGYIDPEDVKNAIRKNTKMVVMNHCSNVIGTIQPVTEVGKICREAGVYLVVDSTQSAGAIPLDIKAMNIDVLVFTGHKCLMGPTGIGGSYVCDHVPVRYTRFGGTGVRSAQKTHLEEFPYRLECGTLNLIGVAGLNAGVKWVTEQGMQAMHAREMVLWNRLVDGIRNNPKVTLYCANPNKPRNPVLSFNIKGLDSGDVGTMLDVDYNIACRTGLQCAPKVHELIGTADIHGTVRLSIGPFNTQTEVDVAIQAIDEITSLAR

SEQ ID NO: 103 - protein, 277 aa, Unknown
  Environmental Sample
MHHHHHHGGSGKIKITGRKIEVSDKLKEYAEKRISKLEKYFQQLIDIHLILYVEKIDHTAELIINGDAVQFHAREKAADFYSAIDMLIDKIESQIARYKDKIQSRKGMGVEDSFSFDISSEQGKDALLNQVSNKPVDNVEAFLQMKVDKKDFLLFKKGVSLVDSDVDYANKNYAVIYKAGDNYRLLEIPFDKSNGDSFSCESFVEYDLNILNDSLTNPEIEFKQRNDCNIERLTLDEAFELIDKNGDNYIPFFNSESGYFNVISRKGKDYEVFVPAF

SEQ ID NO: 104 - protein, 164 aa, Unknown
  Environmental Sample
MHHHHHHGGSGGRLLAGGMAALLLVAGGLFWWSGQASSDPAPQLALAAPPPPAVESLPEGRSDAVGDAPPMPAEASPQSREERRFARYDRNRDGVITRIEMLGSRTKAFKALDTNGDNLLSFEEWAVATSDRFGAADADGDAKLTPAEFATTAPKRTTKPRCRC

SEQ ID NO: 105 - protein, 132 aa, Unknown
  Environmental Sample
MHHHHHHGGSGFWENGYHALASLDDDRDGVLSGKELEGLAIWQDLNGNGLCERGEVKPVADWGIVAISCGYVTDMNRADRIAYSPQGVFIRDGSNRPTYDIILHPALATVHRTTLASAATKRLSEPAFRTAR

SEQ ID NO: 106 - protein, 495 aa, Unknown
  Environmental Sample
MHHHHHHGGSGAPVTSANDESARAAYPRPFSRPPSMGADYNTWRDAKGPDVGATAVDISRLPSRVDNSTRPEFPPIYKQHGGACGQFTAVASMFTYEMNVLNGTRADSDASRFPADFSWNNINAADKKNGSEAYHGWEVAKHIGIPTVKTYGIVHRKNAGPWPNGYGIWREAMEYRVAGYRYTPAQTVAQIHEARGWLFDRNQPGDQSIGGLLALDGRMGELDKVTRMIPEGEHMAGDDVWIRWGPTGYGHGITCVGYDDRVGVDVNGDGKITNDIDTNGDGKVTLADWERGAFIVVNSWGEKWSKDGKIYLLYSAMVDPTWERGNYLGRVEVARAIPRSTLKLKLSCDNRAALRVNIGIAADEDAAVPEHEFAPQPLNGWPLFGEGEHVGAVPLAGPGDDTPLELGIDLTPLFEQLDTSADGNGRLFLSFSRADGSEMKGELHACSIRSYDAKGAFIGESAIEFKTGKFGPAPLEIKTWTIHPNNGMPTSPEPN

SEQ ID NO: 107 - protein, 420 aa, Unknown
  Environmental Sample
MHHHHHHGGSGSHARTASLLALMFTVSGSHAQVGRVVHYDISHDFRLIAPQADTARVMFGDFRHAWIRTNGLETEQHDPPAQQPAFDPYGTEHFGLHGMAFNSGLFGGSVPVQYLTGVIPPTGSPGAAVCLDRVLLASRARACNVLRVDPWVNQAPIDISGRIQSYGYADAAVQGSGAAFVYAFSTAWVRIDSGVTLASGQIQWQIGALVDSVGGGAGSSAIKDPVILTAVNTSTGEVVEHTLVDVDMRHDGPGRVEFAPGTLTVDIPTFELILSVHPGIIGPGQDGTLIIEVDQGVVQNALGSGLYAGSAPAPGTTVPFTVPMPGIVLDYDLNLDPTQPWEVSAEMGGGGGADASAGAPPCAADINGDGVLNFFDVAEFMALFLEQHPAADFNGDGAFDFFDIALFLGAFQAGCADQPG

SEQ ID NO: 108 - protein, 681 aa, Unknown
  Environmental Sample
MHHHHHHGGSGAMASPIAIRLTMSSRLLQVATGEDGESHSEMSSSDFFDEEARILGTQSPIGEQLSEAARRWSALLVWLLTLGPLSLSVLRVPLPDVMGLGLAVWAWYGLLVVLMQAIIRVGIYGVVRWLRKAEARRLEFGDSAGTIDLASHLEAIVVPLTSFFTTTGFALAWYSVYPTGCPTEPSPIPAPEVQGNEASGRIFILLASMMQGICVYDFVTDAVISTLLASAVLAIEIGLMRAGLWGFLRSNFLERILENRYRTYVVEQVRQQTLPPAESNRRISEPIAFPFALPFHVPYVDRLRAWLNAGILDEDNRSFDAQISGRPLAYSEYRRRLGAWIARHGLDEAVDQVARSIPQTDGEAKAAAKEIFARLRRQDRDYLLPDDMAVLFQGRAATRDAYGIFDRDQDGSVSKTEFRHTCVMVYREMRNLALSVQDAGRAFRQLADSLHLLVLTALFFITLAIFGVRVYALSALVFSLLLGLNVLVGDVAKRAFQGIIFLFIDHPYDVGDRVLVQNLSDNDPLNVQRISMLTTVFTRWNGQQVYVPNSLLANATIYNVSRTAEQWDRIRLTIKNPHDQSSPKAPGRSDPIADLRDAVEAFLKRQPADFMAAYELKPIIAGELGKSETDLEIIQLVLGVQCRPTVDSQKRWTRHARLMAFVKQAVAGAGLTLVGAPKSDS

SEQ ID NO: 109 - protein, 149 aa, Unknown
  Environmental Sample
MHHHHHHGGSGKNILTVLALAVTGAMPIAATAADPAQPATPAERATPAEPGAKTPSAMPAEPATPAERATPAGAAKGPLQGVPPEAGRTELPPMFRELDQDKDGQISKGEAKRSAETQASFDSMDTDRNGKISLIEWGAADKAKQRSKQ

SEQ ID NO: 110 - protein, 477 aa, Unknown
  Environmental Sample
MHHHHHHGGSGRAGQSQTEGRTPVIHSKHMVRNGALGAMALLAASGGVMAQDSGLSMVLDRSSIVSGEVVHVEVVGRFPSSVYALAQVGMDVFASIDAWTAASSGVLAGDAVWGAAFDQVHAPFAGLFADPTNPLPIWSGTYAPNVTGPAFLRLRADADFFAYYPSELTSSTAVVADALPGRQYLWVDAVAVEGVGEVAPGEGTGMEVRPDGLVVATPQDEAILIGLLLPAVQKVREAAVRMDVVAQPEVVRTTLLLSTDTATADVVPIDQLSLNFGKIEDPSTGEVMYELTSEGSFSHLILICIIGPDGQQICYPGDRLVAGGTQSAPLIRFDRMPTCLTFSIEQDDVTGEDVLGLSPCDDGPFFIEIPGEFKGLTTGPIEVRVMPIYIEYDGIDGSVTEMHGLPRGPEGRVGIEFSHTASCDADFDGDGALTLFDFLAFQNAFGMGLRSADFDGDGALTLFDFLAYQNAFALGCA

SEQ ID NO: 111 - protein, 447 aa, Unknown
  Environmental Sample
MHHHHHHGGSGKGTPMKYTTSQRLFDRAKELIPGGVNSPVRACRSVGANPLFIRRAEGSRIFDVDGNGYIDYVGSWGPMILGHRHPAVIEALTAALANGTSYGAPTELEVEMAQLIIDAVPSVEMVRMVNSGTEATMSAIRLARAATGRDLIVKFDGCYHGHADSLLVEAGSGVATLAIAGSPGVPESFVSHTVSIAYNDSEAVRQVMAAKGDKIAAVIVEAVAGNMGLVPPVEGFLNTLRQECDRSGSVLIFDEVMTGFRVAYGGAQRLYGIKPDLTCFGKIIGGGLPVGAYGGRRDLMTQMAPQGPVYQAGRLSGNPLAMAAGIAGMRELGKPGFYEALGAKASRLVHGLGAAAKKYDIAVSIANVGSMLGLFFVDTPVRNFEDAKRSNLDRFSAYYRIMLENGIYLAPSQFEALFVSAAHEESDIEATLRAAEAAFKRLSDKQQ

SEQ ID NO: 112 - protein, 313 aa, Unknown
  Environmental Sample
MHHHHHHGGSGMQRRSTALTLFLAITSCYLAADEKAPKKPVHQPTAQGKASFIQDYDLDKDGTVSEAEFAEVRQQRYSAMDENKDGQVSVDEYVNEYAGRLDKKLDTERTGQIKQTLVRIEALDKNKSKTIGHDEYNASGDKAFAYIDTNKDGVISKADPLPERERKPDAKQTVRARPALVMPTTHSVVGMLDMYDQNGDGKVDKTEYQQQRDAAFARTDLDKNGELSSDEYLNEFVDRLDRQIAKTRTAQLKQAAVRFKALDTDNSQQISSAEFNASGERMFKRWDTDLNQQVTMAEALPVIEAEANKGTAE

SEQ ID NO: 113 - protein, 727 aa, Unknown
  Environmental Sample
MHHHHHHGGSGVECMVIQGFLTSGRWSTLGGSILFFCIGLMSLSAQSVNASDPSDLSKALIGPGWSQPALGGELCNWDPSAKAHVICVLGCECPVARFYAAKLQSIAEQYEPRGVRFVGVMGLLQDNESKIRSFVKDTEISFPMVRDENQRLLTQLRATRTPEVFVIDERGSVVYRGRVDDQMAPGVKKNQATTQELVDTLDAVLKGLPIPNPTTTAAGCLITFAKNDSGPSTKQDAARTDAEQQVVSEATAEMDTGIIAPTYAGNIAAIFNKHCYDCHRPGDIGPFDISNVDEIQGWGEMIVEVIENGRMPPWHASSEHGEFRNARVMSAEEKDLVKTWVSAGSPLGNLDTLPELPKVKTGWQLPKEPDLIVPMRETPFTVPPVGTVEYQYFVVDPKLTEDRWITAAQVIPGNASIVHHAIVFIRPPDGEQIKGVSWLTSFVPGQRAAEYPAGYARKVPAGSKFVFQMHYTPIGKVQQDITKVGLVFVDPSEVTHEVSTIAGIDQSFEIPPYAEAHTVRSKISLPRGNSKMLVAAPHMHLRGKSFRLTSVTKRGTEEVLLDVPRYDFNWQHAYEFATPIDVRELQSLEFETSYDNSEGNPFNPNPAEYVMWGDQTWEEMAVVFLDVATEIRSRGDSALDTTQTIPAAIFRGGLAADQTEKKEPSEKAVKFAEDFIKRFDRNGDGVVSKAEVSDIVRRYSFSQIDKNGDQLLTRDELIEAAEGQRAR

SEQ ID NO: 114 - protein, 483 aa, Unknown
  Environmental Sample
MHHHHHHGGSGKTILHPIAIAAFAFCTSLALAQPECEATRIVSPPETPPSRFGDRVATNGRQWIITDANARTLCPGDPFHCSAGAVHSYEMIDGQLVHRQTLTPPRPRLGDFYGISLDIHENRLIVGTLNYTWPDNPRRGGAFVYEYTGEEWVEVGQIQKPDIDPAFLKDMGVTAKMHDGLALLPAGTLRRGVLTYRETAEGWAFHELIESPDGLPADALFGTFLAMGGPWVFISAFRDSSVMPNAGSVYVYRREADGTLAFVEKLVSPDAPAQAYTGFGFGIAFDGQTLAVGAPGVDRDAESQGVVYTFEFDGRSWVQRQELVRPDPQELEQFGQWLSMGGGVLMAMSTRDIPRISHNSPYAYRRGADGVWREAGLLVPNPTFFAIDYGARTATDGRHVLVGSSQDVEPDGITTFGAAYLFDLTCFDCQPDLDHDGVLTIFDYLTFQTAFGTADPLADFDGDGELTLFDFQAFQTAFGQGCP

SEQ ID NO: 115 - protein, 300 aa, Unknown
  Environmental Sample
MHHHHHHGGSGTMKKRIALLTLTAALATPICLACDVSAQDDGDRRNPRRGEGARGDGARGQGGQGGQRGGGEGREGQGRGGLGRNAAGQGGPGQGGPGQGQRGPGLGGFGLGPGGPGGPGGPGGFDGSMMFGQLMKALPLMKALDADGDGELSAMEIENASKVLLTLDTNGDGKLSVDELRPNPADMRPGLLGGPGRGGEGGEGRGMGAEVLARMFEQRDTNNDGFLSGDEIPERMQGIMARIDKDGDGKISKEELQQIQPGMMERLREGFGAGAGGRRGGGGGGGGEGDGPIRPRRPNQ

SEQ ID NO: 116 - protein, 343 aa, Unknown
  Environmental Sample
MHHHHHHGGSGVMQRWIRSALVLLVALALAAQAQPEGKRPRPEGGKFDMPEPDLNGDGVVDDEEAAQYGKARLEQVKKSLDTMVKRFDANGDGNLDDEEQARMKNQLAEHGGGRDPLAMLKRFDKDGDFRLSADEQAEAQKAFAAQAKQPRGGREGQPGREGQRGPQFADPDANGDGIVDEQEARAEAERRVEMARRQLEMFKERQAQNPDVQMPAFMAAVDTNRDGELNGEEANAIVARVMAEFEERNATVLNIFDGNGDGVFDEAEMAALKKAVRYHQEMQRQTMQRMGMGPGGPERRGPQNEAKPERRGPQNEAKPERRGPQNEAKPERPAGKDRERRQK

SEQ ID NO: 117 - protein, 565 aa, Unknown
  Environmental Sample
MHHHHHHGGSGKPAILALAVLLAAPAAVRAADRPNVLLICVDDLKPLLGCYDAPLVQSPNIDRLAARGVLFERAYCNQAVCAPSRNSLMTGLRPQTIGIYDLPTNFRQGAPDAVTVAQYFRQHGYRTEALGKIMHVGHGNFEDQASWSVPHWRPKGGGYQLPASTATTRPARVGGPRGAATECADVTDAAYADGMIADEAIARLRAAQAQPAEPFFLAVGFLKPHLPFVAPKKYWDLYERSSFEPRRQQTPPEGAPTFAPTTWGELRQYSDIPETGPLSADQQRQLIHGYHAAVSYMDAQLGRVLDALDQTGFARNTIIVLWGDHGWHLGDHGMWCKHTNYEQAARIPLIVAVPGTARAGVRTGALAETVDIYPTLCELAGLPAPRDLDGSSFAPILKDPAAATKDAILHVYPRSQLLGRAVRTERYRLVEWKRIGEAADTAELELYDYETDPDETRNLAGDHPETVAQLRAILATQPEAKPQVRAASPAGQEAGTAASKPKQDRAAMFARRDKDGDGTLTRDEFLTGQPDPDEAPKRFVVFDADKNGVLSRDEFITGGKNQTVK

SEQ ID NO: 118 - protein, 259 aa, Unknown
  Environmental Sample
MHHHHHHGGSGRPSATKGFAMSSLDSLSSLFSPSGMLMSSLTSHLQSKAMKKMDMDTDCSVSQSEFQAAMQKAAGKLGVELSGDDASQMFTGFDTDASGALDTAEVGGVVTGLLSTLGNAQSYMQSNGMGQSADDFATRDLDGDGMLSLSEFTGEAAQSGVARVTVTTQTIEVPLDASAPQQSQAVTAADAGTGTVTGGTATNAASSVDTLMASLDTNQDGQISGDELTAFVSQIETVVQRYNDTALASSGSSPSSTQA

SEQ ID NO: 119 - protein, 573 aa, Unknown
  Environmental Sample
MHHHHHHGGSGLAYQAKYMTLAAPPCSPARIRPLCLKKRQTMKPTIASIAVTLLLAPRATLLAAETPESAAQPNIILILADDLGARELACYGNTEHRTPNLDRMAAEGMRFETFYVNPLCTPTRVALMTGQYGFHNGFLGMQDPAFKPDPKSPQAQIGNHFTHADLLKSRGYATALVGKWQLSGVLPTLIHDAGFDEYRMWAYDHNLPPGITHPAHERGGQACRYWHPSIVENGKYLPTKPDDYGPDLFNDFVIDFARRHKTEPFFVYYTSVLTHSPHLETPDPGQPGQRWPATFKSSLEYLDHLMGKLLAGLKAEGLDDNTLVIFLGDNGTGGDGKGMVTELGARVPCIVRGPGVKPGVVSRAVADLTDILPTLAESAGAELSKDRPFDGSSLGPVLRGEEEKHRDWAYSHLDDGRVLRDSRWLLEIAKGAKGEKFFDCGESRDGTGYTDVTNSTDPAVQAARARFAEILAKLPEPKPRDGLMPRSQTTTERKQKKEAGAAGQRVPPTTPDRVARFGQRDQNHDGVLSHEEFMSTLASSDREAGETRFKKLDTDRDGQLTQDEFLGTTGKTE

SEQ ID NO: 120 - protein, 579 aa, Unknown
  Environmental Sample
MHHHHHHGGSGSAMRVSLSLICAVALSMTIATPAGFAAPATTLYLQNPDGGAVRALLIGIDAYQYVRPLKGSVADARDIEGSLRSMGTTDIVTLLDAQANRANILKNISDLAQRTKANDLIILAIAGHGAQEPESIKGSEPDGMQDVFLLPGFAPNADGSGQRILGSEFNHFIRQFELRGAKILFVADTCHGGGMAREIDPRAAEMSFRQVPTYKLSVDKLSPVTDKADPVTDLDLDHTAFLAAVDRNTKAPEVKIPSIEGLRGALSYAVARAFEGGADADHDGKVTLKELFANVRQVVYQLSDQRQNIVTKTSPGRSVDNDVVFQLTRGLTLPVPSEPQPAQQRAIPTVVPDTAATVANASASEPAAARSAFPIRLAALDGGTGYFPKLASREATIEIVKPVDNPDLIWDPKSRDVISWGDVIAYKVDVNDLAMVVDRTAAVRELKKIATKAPQVVRVAPDDAQHRNNQPVQIELSDVAGRSVILFDISGDGTVQMLYPIGSDAAPTQTGNLRLPLRVREPFGAEQVVAITSSQRLNDLEQALLQLNRRKAPGQLIRIMAKYLPPDARVGSIGFFTTP

SEQ ID NO: 121 - protein, 199 aa, Unknown
  Environmental Sample
MHHHHHHGGSGSFIRANNQVISFAEYTDVLQRDQRFFTANELTIPADSGFQNIPEFVEDLLAQSTTRILLKFKSTTWWQGYNNYVNNPIYRLNNLPDLDPNRIDPGNQRGRQGAFTDLCVYYAMKEYLLPLVSQFDTDGADLAKIQYYDTKFMDLFSELVAMADWYDADNSGTVDPDEIAYSYQQTRRTRRRQQIVRVR

SEQ ID NO: 122 - protein, 204 aa, Unknown
  Environmental Sample
MHHHHHHGGSGRSADAGRSSPPNGEPTMTRMELALAAVLAVAAAGGSAAALASGKPGMQRADHGAFAQERVAEMDADKDGKLSAAEMRAFHAARFAKVDANGDGKLSLEELDAGRKAERQQRLKKMVLWLDADGDGMLSAEEFEPRKGAMLARMDADGDGALSMEEMRDGARRFHHRKDGQHGGRHGHHGSPAEAPAGDAAPKN

SEQ ID NO: 123 - protein, 647 aa, Unknown
  Environmental Sample
MHHHHHHGGSGPRLARLLLLLLACCLPAWLPAQPDAPRALGRVTLEPATLPQVTVPVDLYSASHALVVGASRYHSGWPALPGVRDDVAAVSTALEAHGFTVEVVMDPGAQALRDAFNQFIARHGFDSRARLLFYFAGHGHTRQTAYGGEMGYLVPVDAPDPQADINVFLSRALDMETVQVYARRIESRHALFVFDSCFSGSIFALSRDVPPAISNKTANPVRQFITSGGADQTVPDESLFRQQFVEALAGEADRNRDGYVTGTELGDFLHERVVNYTRNAQTPQYGKIRDPKLDKGDFVFQLAKAAPAPPPFVPSVVSVPSVAPAATPDPFAEFEAREKLLAQARERYDFVQGIDAATSGYTAADKARLWKAYLDSYEPSGHEVAKARERLKYWQDWPPAPMPTPTPAGPKPGQDFSLDLGGGVSMPLVWIEPGTFTMGSPSGESGRDSDEGPQTRVTISKGFWMGETEVTQAQWRAVMGSNPSNFKGDTLPVENVSWNDAVEFCRKVSSSTGRTVTLPTEAQWEYACRAGTTTRFSFGDSDSGLGNHAWYGSNSGGQTKPVRGKQPNAWGLYDMHGNVSEWCSDWYGNYPGGSATDPRGPNSGSFRVLRGGSWGLSARYCRSACRLSGDPPCRNDYFGFRPVLSVQ

SEQ ID NO: 124 - protein, 112 aa, Unknown
  Environmental Sample
MHHHHHHGGSGMKHHHHHHGPGGDYNADGWIEFEELMQIFVKTLTGKTITLEVEPSDTIENVKAKIQDKEGIPPDQQRLIFAGKQLEDGRTLSDYNIQKESTLHLVLRLRGG

SEQ ID NO: 125 - protein, 411 aa, Unknown
  Environmental Sample
MHHHHHHGGSGVGKWHIGFKEGLRPHERGFDFHYGFLSGARTYLPGKADVAPIIRNGQPVTDEKEYLTDAFAREAVAFLDRSQDQPFFLYLAFNAVHGPLEATEPYLARFPNLTGTRRIHAGMVAAMDDAVGRVLTKVRALGQEENTLIFFYSDNGGPTRQTTASNEPLRGYKGQFYEGGIRVPFLVQWKGRLPAGVVYREMVMGFDCHATALAAANVDVSLRAPDDLSRSERPTLDGVNLLPFLTGEKLGRPHEQRFWRAGAKHAARVGEWKLVQERGGEPELFNLKDDIGEQSDLAAKEPAKIEELQAVFADWVKGTQPAKWIRQDGRNAEVGGKLKTGSESSIPRRRTPVAGRIAEVFRNTDTNNDGRLTREEYPQPDSFDAVDANRDGFATPEEVRAYYQNRRGTRP

SEQ ID NO: 126 - protein, 428 aa, Unknown
  Environmental Sample
MHHHHHHGGSGQEMAARFSKIVYQQRKLGLLDDGRRDARVRGTGGRNPCFRRPNMPMKKILTIAGTVSVSAGLALATPVEPVYFTTYIDCVTIDNQYVGPDGELRWDVDAGCDIYQVDLYERPMTQAFDLFRGRFGAKEYFEYLDIAQARAGFDDRYLYVAIQLAGRDHVTSGGDRVEMGLVERYGFTLSTDRDGRFGVLLVADQPELKIDPVTRFGTLGVFGYRDTNGDVGGADRSGPTGRDVTKSDNPDEESGLNGYDTTIISDGVLDATSRDVLFVRLSPTDDTVVEFALDYAALGFTRDDLRHLGSFEIEAIKGGPKDPQNYRWNDKFSKEEAGSPNPGPDGQSEFGTGGLENIAEMDSVRGGPIDGGAVCDADFDGDGTLTLFDFLAYQNAFASGDRRADLDGDGSLTLFDFLAFQNAFAAGC

SEQ ID NO: 127 - protein, 187 aa, Unknown
  Environmental Sample
MHHHHHHGGSGRNRKLIALLGCVALVPLAAGALDPQGPPPGADERWAAHDTDGDGAISLAEAEAGAPGIARNFARFDADGDGLVTRAEMHTVRSAEREQRQAQAEERYRKADTNGDGVIDAGEAQAGMPRVAERFGQIDSDASGTLTREELRSAMQAHRAERMQGQGGARQGAAGTGAGQGRRNGGR

SEQ ID NO: 128 - protein, 183 aa, Unknown
  Environmental Sample
MHHHHHHGGSGKRSLLLASALALFATGATAQTVTPAEMFMAQWDLDGDGAVTLAEAREQRGTIFGMFDADDNGAYSAEELASIDEHKLMQLEAGMGPGHQRPAGMAPPPGRGPGNGPGTGPGKAPQAQSFFQPAAEGMAMFDANHDGTVTRTEFVAGTDPWFQLRDRNGDGVLSPADFGPPKG

SEQ ID NO: 129 - protein, 277 aa, Unknown; identical to SEQ ID NO: 103
  Environmental Sample

SEQ ID NO: 130 - protein, 732 aa, Unknown
  Environmental Sample
MHHHHHHGGSGRHVRRTLAPLGARFFVASLLAGAGTATALGDDYSWIAGSGSWGNPSHWAPFGLPGPADFARIGNIAGVADHTVFADRNVSVLGLFLSDGMGFQNEGWSTTVLGPTVLGTGSRIFLSDAVAGSDFITRSLSMTGDNTRIFLEGSMLRVHDTLDIGPGATLIFRDGEARITNSGVGLVNAGQISVGPGASFFTHEGDDALIDLDGPAGGGRVLVSGTSSATIALRARALTDAFDGEIELGSFARLHMLIEDGWEAAAGSRIRALVGPDAERAEINGLGRHFSLNGSVEVRALGSTGVLRIVQETTVGAGANATVFERGQLRFAEVALRGGTFTSHSESLAHGGTFFDGATDWSGAVTIDGAAQQNWVATVSNPLGATIDAGLLDMDGEDGLTRWAINGPLTVNAGSINRAAGNRFEGELSIAGGLLAGLTINLPSPTEPWTLAGRMDLSGSAVVAPTRLSGSPVRVEGVLVVENGGSRVASDVRVLNNPTLEIESGATLRAHGRTAIGAGTTLVGAGTLHNGNGGRLAIEDGAMLGSIGLRNDAILRMGETLGSAGVLTVDRFEQSATGSITMDVGGPERGRDHDVLRVTGGPVSLAGTLVVSPFDAPDAAPFRPMVGDEFTVLVSDAPIEGDFQALPDTLHNGLRYEWETVHEPGALAVRVLRVTTVGCPADLDGDATLTLYDMIDFLNAFEQGTLMADIDGDGHLTLFDFLAFQNAFAAGC

SEQ ID NO: 131 - protein, 784 aa, Unknown
  Environmental Sample
MHHHHHHGGSGWKQVLSLGVLLCAGMAASAEDLQTQPDPLPSVLVDVAVDSGVVRHPLGKDAGVRGADAELVYSTEVTAPGASWLRLWFDRADLAGTPGVDGSYLIITSLEDGAWQRLDGEHIHNWSMSSAYFNGDSVLVELWAYPGTGDNRVALTRVMAGEEPAGVRSICDTTDDRVLSYDPRVGRLSSGCTGWLIDHGGSANRLLTAGHCISNSTTGAVMFFNVPLSSSSGAFRAPPPEYQYPVQNGSIQSSGSGGVGNDMATFQTHSNSNTGLAPMTAQGSAFVLASAAPSASNQPVRVTGFGLRDANFPQIPQEWSRTQKTHAGPFTSRTATAIRYRPDTTGGNSGSPVILESTGQAIGIHTHGGCNTTGGSNAGTTIEHPTLQGYLSTPLGTSIAQTPLLELSTIFASNNGGTVGGAVYFDVAVGPASQRIRALELNIGSALSTEFQVSVYRTAGTAVGKQLSAGQWTLVGSGSGVAAGTDEPTRIVLATPFVLEGGESYGLAVVLTGAAHRYTNATASNTVYHSDEMTLTAGSASSAAFGGSLFNDRVFNGRLFSQHVGDWIVGNMVGNDQATSADLKGGRIKAMGFTMPAGQSVPLGAVELRLEHFGPQTNPLVRVYSGAAAPTTLLGTLSNPPIAAGLGTDFFTPATPVLLNPGTTYWLVVSNAGPDRMDWMANNPALTPGGWASHAGSLFSTSSGPNPPSAGNTSVILNSYAVYVGTANPCAADINGDGLLNFFDISQFVTLFQSQNPAADFNNDGLFNFFDFSAFLAAFNAGCP

SEQ ID NO: 132 - protein, 110 aa, Unknown
  Environmental Sample
MHHHHHHGGSGLAGRDADGNLVAIDVSDIDGDGKLDLAVFEGASSGLLDASDLADAAPAIEPGSSAGILIYENTWAIPFVNALRGADANLVAAGFIPQDALLASLDATGD

SEQ ID NO: 133 - protein, 410 aa, Unknown
  Environmental Sample
MHHHHHHGGSGKQTLLSILVLSFCATNVIGQCGYADYGGTGAYCIANSASGNCVPTYAFIRDKLWTCGPSPNDCYHDPGLPLMVKKASVWYVSFPDGATTQWTVTETGECQHITTPDVCCTGGTTYNPCWPGFICPMVGNGIITQTVSAGVWNSDVRSCCISAADYGSPGLGASTTKQLPHTCATGGGGSSACIYISGSNGFEPDYTSYPVDGCEDGFYDNHNGNPDCCIAASPILIDVSGNGFDLVDLNNSVGFDFVGDGHPLSVTWTAPGSDDAFLVLDRNGNGTIDNGAELFGNFAPQPPSGGRNGFIALAEYDKRVNGGNYNGRIESHDAVFSSLRLWQDANHNGISEPVEIHTLPQLGVRAIDLDYRESRRVDQYGNRFRYRAKVYDAHGASVSRWAWDVFFVKQ

SEQ ID NO: 134 - protein, 182 aa, Unknown
  Environmental Sample
MHHHHHHGGSGPGKLAWIVSGWAKEFVSNCYNSTPSQQGDTTWAFSAIPPKHRARMFPPVGRQDVDPRNRSKEERQMSKTFAFRNVALSLAAGLAVVTATHHAHAAETDQDKAAANFQLADANSDNALSKSEFITFIDLSAASNLGRAGLIKKNRRYDTAFSRLDANKDGAVTPAELSEVGF

SEQ ID NO: 135 - protein, 211 aa, Unknown
  Environmental Sample
MHHHHHHGGSGNKKWLISGGAVLTAAVATAVAFAAPGPMGKADSDGDGAVSKAEAVAMANNHFARMDVNKDGQINAADREAKHKEHFAAMDTDKNGSISEAEFTAAHEARKEKREAMREGHKGMAGHGAEGHVMEAGPRHKGGRGHKGGGMMMLKMADANGDKTITNAEMMAAVDAHFAKADSNKDGKISAEEHTAMRKAMRTHMKAQPAQ

SEQ ID NO: 136 - protein, 153 aa, Unknown
  Environmental Sample
MHHHHHHGGSGLVYDFDGDGDNDVLSSSAHRFGIWWHAQTPDGWITHTIDDTISQTHAVCLADINGDGLMDFVTGKRWWAHMGRDPGAEMPALVVWYELSRKDGKPFWKRHTVDNASGIGTQFEVADVNGDGLLDIVTSNKKGVYCFQQIRQP

SEQ ID NO: 137 - protein, 237 aa, Unknown
  Environmental Sample
MHHHHHHGGSGGEQETALTGLTMPQAQPQGWIRLEESDGYPNFFTVLPDGRLREAFLPDNADLGSTPADDWQTTDYESCGNTLPRSQVLLHGEPVALLQVVSNAQSICQTDRQACASALFAGIDVSGDGNLSTAEIARLLRVAGYVAAVSEDTPATNDELAGVLAAGLPIGPLMASAIINSFDYDDNGVVSLAELSQDRGTLINQLEPDTGDELNSRLNQMKEALKPLGRFLENFGQ

SEQ ID NO: 138 - protein, 430 aa, Unknown
  Environmental Sample
MHHHHHHGGSGNATALSFSQGYSQPVSRDTGTPGVVASASSPAQPVMVGGGRLAPAGGETIDTFVYQSVSERVSYSAQSAAVQSRGGDGADTASAEFRQLTFDFFAESRTEELALFRKSTGAAAESMGSARASSFQAVSRRVEIRFSLSAEVSGAALQGFAKAAKDLPEASDKAFGDFMSFTREALERANEVMGKLLELMDGFFNGEGDFETRMRSLLDGLQSVGLGGGSAAPGPMQLQTAGFSVQMEFSFVSEQFTVNAQGVQESDPIVLDLDGDGIELTGYADGARFDILGNGRAVNTAFVTGGDAFLAIDRNGNGIIDSGKELFGDQNGASNGFEELRKLDSNGDGRIDRLDKEFGSLLLWKDNGNGITEEGELLTLEQAGISEISLGYRNVNQAAAGGNRITQIASFLRTDGTRGTAADAMLSYLA

SEQ ID NO: 139 - protein, 208 aa, Unknown
  Environmental Sample
MHHHHHHGGSGQGSRALLQGALDRAPFVLKCSSWLFDRGDAGDCWQGSGKWRVKHVPFQTRKQPHALSIVFLHLFDAETLTDNGGRMTKTIALSILALLLNAGVCTAGDSYDAHFPDMDTNGDAQVVKEEFTAYFKDNSKPDEAFAIIDADKSGGIDHNEWHAFKNAHGYGHKDGMKHMDGKPHMEGMPHMDGKPHMEGMPHMEGSKP

SEQ ID NO: 140 - protein, 165 aa, Unknown
  Environmental Sample
MHHHHHHGGSGISGISGTNNLYNLSALTGSRTRTSGAAQDDPMNVFSTVDQDGSNSVSESEYGLLSEAIAQVTGTELNSSFSDFDQNGDGELSAGELKLAMEEAGFKPPPPPPPPAGQVSAAYWAQSQKTPQSQSGQSSQGYGPDVLAQVLEYIRQQSGNLDITA

SEQ ID NO: 141 - protein, 197 aa, Unknown
  Environmental Sample
MHHHHHHGGSGTFTLRTLTASSILALGLGGLPAHAQTDATTGSGATTTSGAADTPASSGMSGMSGITGDFTSADSDASGDLSEEEFSTAWFGVLDSDGDGAVSEAEFSSVMGDEDFAAWDTDGSGDLSEDELRAGMTTAGSFGDWDSDASGSLSETEYDAGFDTMNRSDVGITGGSATGTDTGTSDGTTGTSGTAGN

SEQ ID NO: 142 - protein, 821 aa, Unknown
  Environmental Sample
MHHHHHHGGSGEGMLKGEGPGPLPPLLQQYVELRDQYPDYLLLFQVGDFYECFGEDAERLARALGLVLTHKTSKDFTTPMAGIPLRAFEAYAERLLKMGFRLAVADQVEPAEEAEGLVRREVTQLLTPGTLLQESLLPREANYLAAIATGDGWGLAFLDVSTGEFKGTVLKSKSALYDELFRHRPAEVLLAPELLENGAFLDEFRKRFPVMLSEAPFEPEGEGPLALRRARGALLAYAQRTQGGALSLQPFRFYDPGAFMRLPEATLRALEVFEPLRGQDTLFSVLDETRTAPGRRLLQSWLRHPLLDRGPLEARLDRVEGFVREGALREGVRRLLYRLADLERLATRLELGRASPKDLGALRRSLQILPELRALLGEEVGLPDLSPLKEELEAALVEDPPLKVSEGGLIREGYDPDLDALRAAHREGVAYFLELEERERERTGIPTLKVGYNAVFGYYLEVTRPYYERVPKEYRPVQTLKDRQRYTLPEMKEKEREVYRLEALIRRREEEVFLEVRERAKRQAEALREAARILAELDVYAALAEVAVRYGYVRPRFGDRLQIRAGRHPVVERRTEFVPNDLEMAHELVLITGPNMAGKSTFLRQTALIALLAQVGSFVPAEEAHLPLFDGIYTRIGASDDLAGGKSTFMVEMEEVALILKEATENSLVLLDEVGRGTSSLDGVAIATAVAEALHERRAYTLFATHYFELTALGLPRLKNLHVAAREEAGGLVFYHQVLPGPASKSYGVEVAAMAGLPKEVVARARALLQAMAARREGALDAVLERLLALDPDRLTPLEALRLLQELKALALGAPLDTMKG

SEQ ID NO: 143 - protein, 270 aa, Unknown
  Environmental Sample
MHHHHHHGGSGFEVISARQSSAPTPRSDNLEQRLQSDIEASLDYQILRRTLGIASEAAPPKAPVEKQPETATDPEQLLETAARDVARFEQVLSQRELQVEIGQPATPQVSDPLVLDLAGNGFSTTGLERGVRFDLNGDGRQTLTSMPSGDDALLAMDRNGNGRIDDGRELFGDQRGAANGFAELARLDANRDGRLDAQDAAFQQLRLLRFDSQGRQQLQSLEQAGVSAINLRVRDVDIALGAYDRIAQLGSFEFADGRSGQAADLLLAQR

SEQ ID NO: 144 - protein, 236 aa, Unknown
  Environmental Sample
MHHHHHHGGSGPHLGGVLGVGQIFVPTRDGTTGERRFRVMNGRQFRLARTDWREPMRLGFKTSTAMMAALMAATLSTAALAERAPMGGMLMNFDALDADQNGQITKEELAARHAARFAEADADQDGKLAAEEMIAMRDKMQAERKAARAAAMMAEMDADQDGFISPAELPGSAMMDKMFGRMDDNADGAISKEEMEAVQARMQKRMGGEKGHGKGHGKGHGSGERGGFWQWMGGDQ

SEQ ID NO: 145 - protein, 284 aa, Unknown
  Environmental Sample
MHHHHHHGGSGHLTLKDHAMWPLLLLAAILGSLFAFAFNYWRYLKISEAPISSIAAAAQGYIELHGVAYTQTSLKTPFQGIPCVWYRAWAFADVKEGSKTPIDIRLLEYLQSDDIFHLKDSSGSCAVNPKGAEIIYAEARTQHKNEHRYVEEYLPAGKPLYVLGHLDSRHELSSPDAIKKDVNKLIGEWKANPTKMLLRFDQDRSGKVDMQEWEQARLEAHREVGIKHQMQAHTQMYTLAKPADNQLFLISALSPHALRMQYQCWIFAHLTILILLLLIYFRLA

SEQ ID NO: 146 - protein, 301 aa, Unknown
  Environmental Sample
MHHHHHHGGSGKSARGIGEKIGSPGFTLMELLIAMLVGLMAVGAVYGVYSTQLRGHRHHQVLLELQQNLRGAMVIMEQQIRMAGFDPDRSGAFGITDVRRYSLVGTQPDVDGMPGFFYTLDLDEDGVRDPRNGYRNREHCNFRIRHDDGAGRWFLAWDNGMGRHPVAENVRVMVLAYAVDRDGDGRLDRWQGGPHVIWAVDSTNDNMLDTHLDVNNDGVIDLRDFADGAVRIGAVGGSAIVPPIPIDRIRAVRVWLLAESRRPVRGHADIGTYVVGDRLICGNGDGHLRRVVETVIECRNL

SEQ ID NO: 147 - protein, 172 aa, Unknown
  Environmental Sample
MHHHHHHGGSGKPFYIPILNLTLATALSAFSAASALAAPDVMPAFKTTDSNGDGMVSLEEFQAQGGVEKAFEEGDANTDSQLSLDEYTKAIANNDRIKAGKYIDDAWITARVKALMLKDEGVKGLDVNVETHRGVVQLAGWVNTPAQIAQAEKIARRVDGVKAVKNDLSVKR

SEQ ID NO: 148 - protein, 492 aa, Unknown
  Environmental Sample
MHHHHHHGGSGAIRTLASVSALALSVVSGASAAVINVPGDIASLSVAVAVAADGDEIVIAASGAPYLVFPGLQVTNKTLTIRGATGNPADVVIDGAGLDIVLRIAGSGSDGTVLEGITLQNGRGATATNSSGAGVFINDANVTIRDCVIRNNVIPGADGNGAGIYATVSNVEIQRCVIEGNSIDSASGDGVGAYFNGGLQRITDTIFRDNRISTSGDLDLSAVGGGMYADVGSMLLTRCLFEGNRTGFGGGVAVIGNMQSVTIDECEFVDNEARNGGGFGANSTAGPLVPRIRNSLFVGNMALNDSAIFTDKGGFFTNLTMAGNISSGSYVVGGSSPTGTTVLDNSIIWGNTYNQANGPIPTTTPDVVRWCILQDPYTGAVGSLANQVIDPMFVDASNRDFRLMPMSPAIDAGDTNLYFGPFADLDGAPRVVDVPAVADTGFTLSGPVIDIGAYEFQVEGPTDTCPTDANGDGVINFADLNAVLSVFGTDCD

SEQ ID NO: 149 - protein, 237 aa, Unknown
  Environmental Sample
MHHHHHHGGSGNAPRTLIAGGAALLALALATPAVLEAQQDGNTGRRGGRGNFDPAEFFSRMDANGDGSLDASEFRGGEDRFKEADKNGDGKVSQEEMQAAFQARMENFRRGDRGTGDGAPGFGPGNFVDRLKEPLGVSEEEWAILRPRLEKIATLQMEMRPGGGRGPNAAAAMPEAEALKATLDRPEATAEEIAAKIADLRKAREKKQADLKAAREELRELVTPHQEGVLILEGVLD

SEQ ID NO: 150 - protein, 178 aa, Unknown
  Environmental Sample
MHHHHHHGGSGRKWRFVLAVILCVVFFTFTSVGATEIASLESAGGKVILDWNDNTESDLTGYKVYRSVSQEGPFDEIAQVSASYYEDNDVVDGRTYFYYVTAVDTSANESAGSKKAYASLRMPGDIDGNGLVDFSDLALFAQNWLMADCWYCDGGDLDGNEQVDFYDLMILAENWLDK

SEQ ID NO: 151 - protein, 312 aa, Unknown
  Environmental Sample
MHHHHHHGGSGFPARWVAEWRHDYANLALGGGNLLILLLGLQLQSRIGWQISLTLVGLTSFWAWYANLKRYRTVADTPTSRIASAPQGYIEIVGRGQQPPGATLTSPINNLPCLWYRYRIERKKGDRWEHVESGISHDSFGISDGSGLILIDPDGAEIMTSRKQVSNTGGYRKTEWTLIEGETIYVIGEHVTLDGPNAVLDKKADLATLLTDWKANKTTLLERFDANRDGEISLNEWDRARQAASDEVDRAHLDIRLKDGIHLMRRPAHGRPFLIANREVTALVRHFRLWSWVHLLLVLATLLGMMLIDRPT

SEQ ID NO: 152 - protein, 613 aa, Unknown
  Environmental Sample
MHHHHHHGGSGGDALSMRRFLFWLVGGSLGGLAAEALARVGEGPGAGGDRSAAPRFTLVTPAAGLSNATFIPNTGYPAENAIQAGGVGIGDFNNDGWPDLFVPSGGTGPDKLYINRGDGTFVDEGAAWGVNKWSRAAGVAVGDFDGDGYLDIYCVNYGDFPFPAAVGRSKLYRNLGPDANGQWRFVDVAQQAGVANVFGVIGGMGAAFGDYDLDGHLDLFVSTWIFFPGGNRLFRNNGDGTFTNVSHIMPQEQFPLRGFTPNFADIDDDGWPDLLLTNDFFTSRLYRNSGRRSDGTFAFENITQAAGITRDCNGMGATLADLDGDGRLDWFMTNIYLPKGSPGCANTLYRGLGVVEGVARFEDVGVASGAGDTGWAWGVTGFDVNNNGWTDLAAVGGWPRWPGTPMRLYMNNGNGTFTDRAQSAGVAWTGQGRGLVHFDFNNDGRVDMFAVNNGAVGRLYRNDSTGTGHWLRLDFDTSTHPCAAPRGVGTRVWVTAGDRTWMQLLDSRTTYLSQSEQTLHFGLGNAEAVDSVEIRWADGSGTTLYDVAVNQRLTVQAFHDADTDRNRRLDFFDIAAFLNAYIAGDAAADADRDGVVTPADIGRFVERFRAGCP

SEQ ID NO: 153 - protein, 178 aa, Unknown
  Environmental Sample
MHHHHHHGGSGEAPETEESMNAIRLSLAAGALAFGGILFAQTTSGQDASAAQQPAAGAAVQAPAGPGYGPRDGSGPGERMHRHHREGKHGHRGGMMMGADGNRDGKVSREELLSAQKRQLAMFERADADKDGTLTRDEMRAAREAMREEYRKRKGEPRRDGERRAPGAPQAPAGGAQG

SEQ ID NO: 154 - protein, 172 aa, Unknown
  Environmental Sample
MHHHHHHGGSGGRKNHILRPIFAPFGRENENIRFLTVGSFIGVGSMKNIKLYVLGTVLVSALSVPVSVRAENVADNAANDAMKRPPAGERMIEALDTDKSGDVSLEEFQAKHAEQFKTMDANNDGKLTKDEIGKAHEQRKAKMKERMHEKREQMKEKAAKEAAPAEEAPKAE

SEQ ID NO: 155 - protein, 455 aa, Unknown
  Environmental Sample
MHHHHHHGGSGARINGPKLLILVSFLSLFFAFTSVFAEDYSSTSFILRDPIVAIEGGRSTSSSFTYFSNTGETIIGENTSASFDNREGNLYYPVATSPVAGATPGDAAVTLNWTASSGTLANITGYQVGVATVPGGPYTFQSVGNVLSTINTGLANGTTYYFVVKAYAGTLYLASSSEVSATPVAAGGGGGGAGGGGGGGGGGGGGSSSSGSGAATFSGKAYPKSTVTLLKDAQVAATTVAGTDASFAMDVDELSGGNYVFSLYSEDYQGRRSSLVSFPTSVTAGATTRVTGIFIAPSVAVDKSEVKKGDDIAIFGQSASNSNILITINSDQEFFANASTSADGTYIYYFNTAPLELGAHTTKSKASLNSRMVSGYSLAASFQVGDKNVLAVAGACSKADVNCDGKVNLVDFSITAFWYKRTLSAEFKTIEAERLNNDGKVDLVDFSLMAYYWTG

SEQ ID NO: 156 - protein, 215 aa, Unknown
  Environmental Sample
MHHHHHHGGSGKTFKIAAAAAVMATAGVAMYAASPVMAQGMGAERGKPMTWADAKGMGDRMWERLDVNKDGKLDQVDRTARMEQRFKSIDTDGNGAISRDEFMAHHAQMGERKHGGARMAGGDDAMGDHGKGHKRGRWGKGGMAGGHMLAMADTNKDGAVSRAEFDAMAKAHFDKADANKDGTVTPEERRAMMKDMMGRMHGKRGPAGQPAPAAD

SEQ ID NO: 157 - protein, 626 aa, Unknown
  Environmental Sample
MHHHHHHGGSGEIGVESQQRAVVVQHLFKVGDLPLRVHRVAKEAAPHLIANPPQGHAFQAVLNDLPIEPPRSGIAPQGGPLAQQAAVTLHKWKLGRATEPASGAVEGAGEILRGGAEGGSVQRPRGRAAGVEARQGMAQGLVLLLNGTALVGEGLRHPFQHRPEREQAVAGLAGKIGAGKEGGVVVRHQKHREGPAAGPPGEQLVGALVDAVQVRSLLPVHLDVDVEPVHQRRGLCILEGLVGHHMAPVAGGVADGEQDRLALATRPLQRLRPPGVPLHRVVGVLQQIGAVAVGQVVLRHFAAPLGVPCEVEATAGKSTARCHGLDRGGRHRPQGWGSSLRNRKNQRPPLYLRKKMAHIIGLSLSRGVPMKIRRSPLSLALLATALMSGGADAAPWGAPGYLAFDRNGDGQVSEEEFQAMRAERMAERARQGYPMHGARHAPSFSDFDQDRDGNLTPEEIRDGIAAQRQKMMQQRPGRGDRCGYGGCPQAAAAPAEAVAPTAAPEAAPAAAPESKAAATDSRGAAGRKGKARPGFAEFDSNGDGFISPEEFDQVRAARQAARQAALAERGYPMMGRMPPFAGPDFSAGPGPQGFPPMMAPAGWGPAPGGYPAYPTYPAYPNYPAYW

SEQ ID NO: 158 - protein, 109 aa, Unknown
  Environmental Sample
MHHHHHHGGSGKKTFLTALLVSAFAASAFVVPAMAEEGKVREWGEKYFEKIDTNGDKSISKDEHTAFSDSKFSEADKNGDGVISHEEFLEKKQEHKEKFKDMKNKADGE

SEQ ID NO: 159 - protein, 441 aa, Unknown
  Environmental Sample
MHHHHHHGGSGHAKSQTQEIYERLCRVIPGGVNSPVRSCKNLLPCPVVAESGLGDMLYDVDGNGYIDFCGSWGALIHGHAHPAILEAVGKRMQKGTTFGLTTEIEEQLARKVCELVPSIEKIRFVSSGTEATMSAVRLARGATKRELVVKFTGNYHGHADFFLVNAGSGVLQLNATSSSSGIPQSIVQHTVSLTYNDLSAFSAFMREHGQSTAAVILEPVAGNMGLVPATQEFIALLRQETKRCGALLIFDEVMNGFRLGLQGAQGLYGVKPDLTCFGKIIGGGFPAAAFGGSAAIMDHLSPLGSVYQAGTLSGNPLAMEAGLQALQMLEGEGFYAELQAKSDMITKPVEELLRKSNANACIQQVGSMFSIFFGKRKVSNMDDVKEADKEQFAHFFRYMLENGVYIPPSAVEAWFVSMAHTRENLEKTRDLILGYIAEMDV

SEQ ID NO: 160 - protein, 425 aa, Unknown
  Environmental Sample
MHHHHHHGGSGRKFMLRSAFLVLITFTFFQGVLADGEYTGQFNKTLVPLTEDLERVVLKSVTMQQLKGKIAVPEDAHLAAARLADPRTKNFSILTLLVEEQGEDPYLFIDINGDNALTDDEKLPLKQSEKDNPYIWNASAEIKLADGPFKSLPLFVEYLRSMKMDKMGPEDRLLRQSTEVMAGGRVNINGKDVLFQYTYDADKKKVDPLNGWLGVDTDGDGKIDIDDLSAESTKANEETVVFRAADVYVSTKKADISKDQITVRQNQAKDYKRAELWTGKEFPQFSFTDFEGKKHTFSEYRGKYILLDVWGLWCPACRDELPYLKEANRRFQSRGLVVLGLNTDENYTVDSMKAALSKAGMTWTHAQFESINEFLRTGLRIHSFPSTFLISPEGKILSMNRVDRDESSLRGRSLLETLDELLPAI

SEQ ID NO: 161 - protein, 323 aa, Unknown
  Environmental Sample
MHHHHHHGGSGETRFTEDKWVKGYEIQPTARDVVHHVLVFVRAPEEELPGSEDEGIGGYFAIYVPGNSHQVFPEGFAKRIPAGARLRFQIHYTPSGTATQDQLRIGFVFAKERPRHIVRVAGLANTRITIPPAAADHRDEASITVPWDVMLLGFVPHLHVRGKACRYEAFLPDGTRKVLLDIPRYDFNWQLRYELAEPLAIPRGSRLVFTAWFDNSDQNPANPNPNKTVRWGPQTFDEMLLGYIEYFTNDDRPGTLGKQRGGVGSVDVEAAFRRLDSNGDGKLTRDELPPRQRDRLMKLDTNQDGAITVEEPNRLTTLRNPGG

SEQ ID NO: 162 - protein, 218 aa, Unknown
  Environmental Sample
MHHHHHHGGSGSISKTLLLSAGAVLAFAATPAMAQEASVTTKTTTAVSPTVDGGAVYETHSVTKPTDTVAVSGEARRPVVFYYYDVKAGQIIAASTMSEEIFSIWDKDGNGYISPQEYYNNEMVVYQPVETETKVFSDVDADGRLELTLEEYTMRLEKVPGYTDINADAKTGLTAQEFVGAGFQETDDDDNNQVSYGELVEAFYGQPRMASEQERYNN

SEQ ID NO: 163 - protein, 871 aa, Unknown
  Environmental Sample
MHHHHHHGGSGSMRHSVLSRNTRVSMGAVSALVMLAGSAHAADWLSPDSTPTRPVAFGQRAMITPLDAAKQRAEQYIELQTFMSLPLDAQQRIIDAGAAPDLYQANDFDERIVAQHGETPYEAVASVVSRETFDKMRPMHRHMLKRVLESSQERGPFGHLCFTPGTPSDVVQAFEDAIFGNIPHGDRFQLTGRWTTSALGEPSFNQGDPVRLTYSFVPDGTFVPDLIGVSGNSQLFAFLNGIYGTPAVWQAIYASMWDRWASISGLEYILEPNDDGVALNDNPGVPGVRGDLRMAAIPIDGGGGTLAYNNFPNDGDMVLDAFDSFYNDTSNNSIRLFNILAHEHGHGQGLLHVCPREENKLMEPFISVAFNGPQFDDQLASQRHYGDNFEPNDNALSASDLGAFTGSTITQNLLSIDDDSDTDYYSFTVASSTAVAVTVRAANRAPYLQGPQNSGCTGGTLFDPRIIHDLKVDILASDGVTVLDSVDAAPAGENETAVAALGSAGTYFVRVRGSGANNIQRYALDIENAPSIIRLASTVDEFILPGTSLDVTADAFSSAADPIVPGSVTLNYRFDNGAFQQIVMSPSGGNVFIASIPSVSCDDTPQFFFSASTSGGATLLDPPQGAGAPFSFGVGELVVSVDDDFETDLGWTVSGNATDGQWTRGVPVNDDRGDPPSDFDGSGQSWVTDNAPGNSDVDGGSTILTSPVFDASEGGTMSYAYWVNSGPGDLIDDSLAVQVATDAEGTNWTTVRNYTTESDDWRTDSVSIGVGGEIEPTSTLRVRFIATDGGTASLIEAGVDAFRIDSLSCVDVVACDGDTNGDNVVNFTDLNTVLAAFGQTGMGLAGDVNNDGVVNFNDLNEVLANFGASCN

SEQ ID NO: 164 - protein, 286 aa, Unknown
  Environmental Sample
MHHHHHHGGSGTRPVQAAYRIRGIASAPGEKEGKMIHRLIAAGLMASVAAAALAVQTPAPVAPPTAPAPPMAAKDMTRGEVQAMVREHFGKLDKNRDGAIAKDELDFGPMALRGGADGPGERRIGIRRGEGGDHGDMAMHGGPEHGDVMFEHHGGPARDPAKAFDRLDTNKDGSISREEFAKGREMRIERRIVRGGPEGADRGPVKRMQWREHAGKPGGVRGARMIVMSDADKDGHITLAEAEAMALKHFDQMDANKDGRVTAEERRSGRPMMFRMRRQEHAPKGS

SEQ ID NO: 165 - protein, 354 aa, Unknown
  Environmental Sample
MHHHHHHGGSGKTPNPGRISPGLYLLLGILVSACAPREATVGLLLYNESDPYIMEFARQIMDEAGTSLEITKLDAGNSQLIQNEQIGRLLDAKPDLLMINPVDRLGAYAIIRRLQAEDVPVIFFNREPLANDLSIWDQTYYVGAKAEQSGQMQASLVMDLFGGDPDALNLYDRNKDGIIQTIVLKGEQGHQDAEIRTREVLRSFESMGLPVEVLALEVANWNRDEAYEKMGRLLGSFSSQVELVVSNNDAMALGAISRMRQADMFKDTNGNGRLDREDESWIPVVGIDGLREAEESIHDGYLYGTVKNDSLSMAKAMVELTAALLSGRDPESLAYPLVAGKYIWIDYQPFVSQD

SEQ ID NO: 166 - protein, 350 aa, Unknown
  Environmental Sample
MHHHHHHGGSGPRQSPLAVAVLAATAAASAQSGPITLDLDSPSLDRWNYPFNPTPGVRGTATIFGATGLDGFDDRDAQFIVGFDTGDAIPTGMGLGFYRLVSARLTLVVQNDLAFTYDPTPDPLESFLLPDDPDFVPDATPGRPIEVYATAYRNGFTIGNWEETTPFGDVPIIPPAEGARNAFAAFYPLAGEPVDLSRQVRLGLESTPFAIGQAADVPVGELVPAETVFTFDLDPCAPGLAAFLDVSLDAGRLNLTVTSMHFAELGSAEFPGFFTKENPLSPILGYSPRLELTVIAVDDADVNGDGSLDLFDFLAFQNAFAAGGAIADFDGDCSLTLFDFLAFQNAFGGG

SEQ ID NO: 167 - protein, 219 aa, Unknown
  Environmental Sample
MHHHHHHGGSGAHRPPFAALPRRGFLAGAGAALALGAAPLPVRAQLFFDPVLRVLPSILVRQGRSYRPLLESVGEVRPVTSRTGDLAMPDTSIPVFEFPENLAVFRDYDLDHSRFISKHEAMLAWLTLMAGIRTGQRLGPGDLRQRVAPDGPDVPLHYVELPRTDRRQIWLLLKETPEGARLIRDMETFLSMQIALGRGPVWLNGYRQGGMESGNRRGH

SEQ ID NO: 168 - protein, 670 aa, Unknown
  Environmental Sample
MHHHHHHGGSGHGCLRPNTTEPNSREFGAFPLTRIEWNRRQIAVSRVSPLYGSGLMPNSNALFHRRRLLVRRSGSLALFVVLILILIAGGGGLVWYYFQQDRSETVERVLTTSVTRGPFEQIVLEQGVVESSSNVDIKCEVKSGASSTTEIIWVIDEGTQVKKGDKLVELKTSALERDLVQQQIVCNTSYALVVQAENTLRAAEIARLEYLEGSFRQEEQTILSEIFVAEENLRRAQLAFQSTERLAARGIVSALQLEGDQFAVEKARNELEAGQTKLEVMRKYTKAKMLKQFDSDIATAQARWDSEKESHKLEMEKLEEIKQQIAKCTIIAPEAGQVVYANTFSGFGGNSEIVVEQGALVRENQVLIRLPDPTKMQVKATVNESRISLIRAEMPVSIEFDAIRGRKLQGRVTRVNQYAEPTSWRSGNIKEYAAYVEIFDPPVEVRSGMNAEVRIFVERQDSALQVPVQAVYETKGRFFCLLKDGERWETREVQVGSSNDSFMTIKSGLSEGENVVLNPRAYAERLELPYIPDPVAPERSPEQAGPQGELADVGGSGPGGPGRGGGRGAAGGDSAPDGERSGGRGPAGGGSAAGGPGGGFDPNRLFAMLDSDGDGTISAEELAKIPEEQRARMAANDLDGDGAVSREEFAKAIAARGSGNPGSRSEGNGS

SEQ ID NO: 169 - protein, 204 aa, Unknown
  Environmental Sample
MHHHHHHGGSGKRNTLLAAMTLTATVLGGAAFAESHHGHGGKSGPGAAQGGAPGMMGMMEGMDGMMDMMQRMHGNMMGGGMMGVMGPMGGGMTKMLDADGDGKVTPEEMRTQLQAKLAEYDGDGDGSLSIAEFETLHSAMIREMMVDRFQHLDADGDGAVTAEEMVAPAEMMERMQMMRSNMAQSQGQPGNGQGMGDGTMMNDN

SEQ ID NO: 170 - protein, 114 aa, Unknown
  Environmental Sample
MHHHHHHGGSGHTPTRHIVLGLAAPLVLAACAAPHTDEIPETRVKRQMIGLLEKFDRWDYDGNGKLTANELGEATKLSGVPATDIIKFYDTDGDGGITLREAQAGYGRPVQQAR

SEQ ID NO: 171 - protein, 310 aa, Unknown
  Environmental Sample
MHHHHHHGGSGLVQLRHRPTDVILPFVQFGAVVLALSAGEGPGAVTGLGVLLATGLIGWKRALRHARLIADTPTSRIASAAQGYTELRGRGQPLDGMPLRSPINGLPVLWYRVLIEQRQRDGKWKRETVDESDASFLLEDASGQCVVDPEGADMMVKRCDVVRRGDMRYTQWSLIRHDRIYVLGDFATLGSVNTDFDFSAQVRELLASWKADHPGLLARFDLDGNGEIDVREWELARSQARREVRRLHEEVMAAPEVHVMRRPTGRRLYLISDHDPARIARRYRALAIFHAAVVIAAAAATAWFAQIGVF

SEQ ID NO: 172 - protein, 127 aa, Unknown
  Environmental Sample
MHHHHHHGGSGPVRRVAACLAFALAPTVASAPFAATPADYLARMDADGDGRVSLAEYQAWMTRGFRAMDRNGDGILQDGELPPGMILRPSQPRTLDAFLANLARAFARLDRDGDGHLDAAELAAPPR

SEQ ID NO: 173 - protein, 224 aa, Unknown
  Environmental Sample
MHHHHHHGGSGPQRTEIIMRNLKTSLAAATALALSLAACGNEPDNADTLDTDTAMTDSTLADSTVNSDEFNPLERDYTLTAEARERRAEFDMDEFNNEFREIHDGLAQSGSATATGGTTTTTSPGTTTTTTGQTGSGSGMTDRSAMNWSYLDRNSDGRLSVAEYAIWAIPMDPNAPKPNDETKPYTTADQANRAADSFFYYDTDGDYYLSQIEFNNARRGGDVS

SEQ ID NO: 174 - protein, 194 aa, Unknown
  Environmental Sample
MHHHHHHGGSGWASVSPKTQRKKSADSDADSSDERNDAIIEDVFSKYSKNGYMSRFQFALVVSKLSKHVKELKGVESETVAAAFNLFSTGGQVMTLGEFKKWWGESDKFSYFVGKRSRMISKAYALYKKYSSIETLNTSTENFKARRMTLKEFLKLLGDLKIEVENDGDEFDQIDQDGDGALSFKEFCAWLKWF

SEQ ID NO: 175 - protein, 670 aa, Unknown
  Environmental Sample
MHHHHHHGGSGTGCSPPPPPLLLVEQRASLPDGAQEQLPRLAQQCGLDLFTVRQRLTGRGLACLAEAPRERLEPIVPLLETLGLRGWIVQPTPPRFAPQRVRSVELAGDSLRFATAGEPLAAGHEDRVLAVLADLSGTLVQRNLKKLAVQTTYLGAGTPLDPEEIYQSVLRGRPLLDLYRLDDSGAIGQGVRLFPGRFDPNGLGEHKSLSAAGNLDAILRLLRERVGELFLHSDFGLVELPGCRPQPLADGQAPDQSHLAPVTRFGWLLADWHAVRGRTPAPVTPERLAAAALLGIPAAVVAGGGSPPGLEELAAELRTDGAPPPEKAPPGRTLPPPPELKPLHRPWLSRRTLQIVFGVVAGSLAAIGGGGELVKTALHYGLKTGAVPALFALLFGGWGLSSLRLKRHMENLPTSKARSVAMGLVEVHGRARRQYALVSPMTHQACVFYRLRRFRRDGDDRAWQEYSTTDCGPVPFELEDDTGRLTIDPAGARIEPRHRQEGFPGEGSLFFTGGGSTDATEKWVEEIIPDGAAIYVSGFARSADRATPSLAERTRQSLRELKQDPQRMRRFDRDGDGRVDGDEWQQARETVEQEVLERSLEERLEAAPPATRVVIGHPRQRLLPFVIAETPSELHLTRRQGLLSGGLLGLGFVLAVVALIQLLRFFAVSG

SEQ ID NO: 176 - protein, 139 aa, Unknown
  Environmental Sample
MHHHHHHGGSGLRLAGLTAAFISLGATAVATGLRDYDGDGRISRAEFADAVGRIARAADVNKDGVIDPDEFVWTPDCLRLFDNDGDGRITSVGIHEFRDGMILAFDALDLDGDGYLSPAEASDARRYGVHIASNDIKSS

SEQ ID NO: 177 - protein, 248 aa, Unknown
  Environmental Sample
MHHHHHHGGSGPGTPIIAPLSGITCTWYSYKVEEKTDAAGDQRERWRTLRNETSDDLFLLKDDTGECVIDPEGAEVMPSISEVWFGDTPSWNGQLLRRSSGRYRYTERRMHPGDALYAIGQFRSIGGSQELPNTHEEVRELLAEWKRDQVALHARFDRDNDGVLSLDEWEAVRKAAWKEVIAAQARRARGPVHHLLTRPDDSRRPFILSVLPQELLIRRYRNYAGLSLLVFLLAGSAATWMLTARFAG

SEQ ID NO: 178 - protein, 163 aa, Unknown
  Environmental Sample
MHHHHHHGGSGNAIKLASALTAAVVLSNPLLALSADDHGARVETRFKAADKDNDGSLTREEAKAMPRVAKNFDAIDTDKSGTVTRVEIQASMKRMAKETHKRGEERFKAADTDNDGSLTREEAKVMPNVAKNFDAIDADKSGAVTGKEIHNYMKAHRQQSKKS

SEQ ID NO: 179 - protein, 441 aa, Unknown
  Environmental Sample
MHHHHHHGGSGGHRSRAPSPRLRGEGARRAMGDCSEAPIAVRTRRWAIGGLSLFRGLAGGIVIAPIGPGCESKERLVGRITLSLALLGMASLAQAQTVQVLGDLTSGGAIAGDFPADLVGGEDSPMTWDFYTVEVEAGQLVRIEVDRTTDSLDPVSVAYFGDVQGQPLPPEGTFVFDADLFLPMVFVASGDDDDPSATGFGPFGDPNYTFTADATGIYTIIVASFISDPGELGYTVEATIGDAPTLRLERLGDTTFGDRFNRPSSLTSLSGTATDVAFEAIEIEVVEDGLFTVLGDQTNFGFLWDGYLLVYEGGFDPFSPLDGLIALNDDYSGALLPGTGVGYSGIENLTLRSGVPYVIVTTGFANDDAGPYQLQVLGTSDVRIFTCFADIDGDGQLTIFDFLEFQNLFAAGDLRADCDEDGELTLFDFLCFQNAFAAGCE

SEQ ID NO: 180 - protein, 830 aa, Unknown; identical to SEQ ID NO: 30
  Environmental Sample

SEQ ID NO: 181 - protein, 550 aa, Unknown
  Environmental Sample
MHHHHHHGGSGPVQDEYLIDVDAGKGVAVGDLFSIVKPGEKVIHPVTKEVLGNLDEVKGILQVTRVKTGYSYARPVREAKGIVRGDAVRRFENVAAAFWDQEGTGEDLFKELKAALPQLEWQGYYRGAGQTLPADTPPLVFALRAGKLEVLGPGGRALFVYPVAASQPETARPAAPIASAPSAIVPAPIPTTSAAAPAAKAIVPAPATASGSAILKSQGANAEGLWMSPEIKGELVGLAVADINGDGRLETAIAFPHRLEIVRISAGRYETVTSLDLGFGQKVVSLDSADLDRNGVAELYLTAADKDVLKSLVVTMKNGKLTITNKNLPWYFRTVKLPGEKELLLAQILGRLDRDFDGPFLRLEMKGDKLVAGEPFVVPNGLELFGFGAFTTPNGEQLFAQINFLDNLKVVKPNGETIWSSEERFGGGEAFIERKDPDRSPAEGPTSRNAYMQKRLELGASGELLVPVNEGSRLLKGARSFDRSHIRGMVWSGFSLQEQWRTQPQEAYLADYRLADADNDGKLELIQALVFSRDGFGSKARSALAIFELP

SEQ ID NO: 182 - protein, 131 aa, Unknown
  Environmental Sample
MHHHHHHGGSGAMPKTQQKAAKELLALFDINGDGTVSEEDLEKLEKILELEAKRAQEQDRDRKEDAQRNMSWFALFGMLLYPVAVMLSDFLNLDGAANILGTMAPTYFVAVAAIVAAFYGKEAYLSRNKDE

SEQ ID NO: 183 - protein, 201 aa, Unknown
  Environmental Sample
MHHHHHHGGSGKNLSRTVKIGFVMLGSLGIITSALLAQDLPDRGPVPFATYDANGDGYVSKKEFYDVRDARKAQKEAQGYPMKNAANAPDFSALDKDKDGKLTELELLRGQNEQMQKNKGNKQMQPQQSRMPAFESFDTNKDGMLSKQELTESRDKRMEQKAADGKMLKNSANRMPFEDIDANGDGQISKEEFLNHQNRRR

SEQ ID NO: 184 - protein, 150 aa, Unknown
  Environmental Sample
MHHHHHHGGSGATISTKEREKHMAEGGDIYNENYFFRDYVSEDICAYGIGPFWLYHFKETLIGIRDNQERKAWFADINTVKDARSSFVPTMDQLTEEHIKEAIQEIDTNGETLEYVNIDDLQPMAKEMMIKEAMREVDARATGTPRNLNS

SEQ ID NO: 185 - protein, 225 aa, Unknown
  Environmental Sample
MHHHHHHGGSGPAQQPEKWIRLEESDGYPNFFTVLPDGRLREAFLPDNADLASAPAEDWQTTDYESCGTVLPRSHVLLHGEPVALLQVVSNVQSVCQTDRQACVNQLFAGIDVSGDGNLSTAEIARLFRVAGYVAAVSEDTPAGNDELAGVLAAGLPLGPLMASAIINSFDYDDNGVVSLSELSQDRGTLIDQLEPETGDELNSRLNQMKEALKPLGRILENFGQ

SEQ ID NO: 186 - protein, 187 aa, Unknown
  Environmental Sample
MHHHHHHGGSGWGVSRHDHTILEGDITMKTSNLTPALAAAFLLGGIGLAQAESGPGKMGQGMWMQHSFEELDADADGRITQEEMAAHMQARFEGADADGDGALSRDELVTRMTERQAERIAAYADHMIERHDSDGDGKLSPDEMKADRQGRMFKRADADGDGAITEAEFDKMREDMKSRHQGMKAKQ

SEQ ID NO: 187 - protein, 285 aa, Unknown
  Environmental Sample
MHHHHHHGGSGKATLEGIFAGVAALLICTGASPAADLHPIVEVESGYLFGAISDGKWIKADETAKLIGDETTYQVYGLTQALGEAKAGKPTRPEGLPCEETLAVSLSPKPENGVIAIAAAWNALPRKPKVIDPTQKAYVDVVRDFLETKEIKQPKVKIDSILRVDLDGDGEEEVLISAANYFGKADRVPMRSPAGSYSMVLLRRVVAGKVETQLVEGEFHPKAYVSKESSFDAPSIYKVIATLDLDGDGKLEVVVGSNYYEGEEITIYRCDPKKVETLLSVACGA

SEQ ID NO: 188 - protein, 312 aa, Unknown; identical to SEQ ID NO: 65
  Environmental Sample

SEQ ID NO: 189 - protein, 442 aa, Unknown
  Environmental Sample
MHHHHHHGGSGEAATRTQVSPYHLASRSRLEIGKTKSGTDTGTYQDPYKTLDLTGLYNYYNIGATQGTYPIRNGLEYAKYGPGRKPEQTDTDNLYLIHWNNPWRSIVGGAIFIGNSYINRNQHTLYLQKFDLDDTYDGAFWHQYMGNLDAPRYEGNETYKAYLEMGQMENNFEFIIPVIPGIPEKPVAKPTDARSRNHWLKTMTVEGITLSPAFDPAKTEYTTTVNNDETKATITAAPVNSKAKISGTGTYNLAEGNNIIKLTVTAESGEKRVYTISITRKAADGTVPPDVITPQDPIPALTFDQQILKVSGETVTGVDPAKSLNQVELFTASLGIPAGYQVQVLDAAGKPQQNLVGTGNIVQISYENLLTQRYTVIVYGDTDGDGRITSADLNRTFNHVLQKSTLNGAFASAADADKDGKVTSADLNRIFNHVLQKAALAQ

SEQ ID NO: 190 - protein, 555 aa, Unknown
  Environmental Sample
MHHHHHHGGSGNKEQFVISRFKKILRESLQEKADSLMTKLNYDEETELYPENEFDYVEEEMNEGETCEQCGGEIKEGETCEQCGGKGEVMELGGMEDSHPKFGDKNLSKLTKKQMEDLLYGMEDEEDEDYKPRKRNKRDDDEEFDFELDLSEEELDEKLYGKQHKLDRNKNGRIDKEDFKMLRKQQDETEQLYEVEFDREIEEEETVEGNAFTGALAKAKEEGKNTFEVDGKKYQVNEKWEGDVEVEQTGEYSGMSIEELNSAISKLKKQNDKFKEDGKKVPQKNRTKMSQLYFAKRAKQGWKGKGKAKVKESILYTESDLIDLIENIVVEETKFNKSEPKGYREYERAHKADKKENDDYLKSVAKKMTDYLKGMSDDGSKYEMKETKKFPTENGGMKKGNRKKYTPSDAVDEYVDAFSYPGQTNLVYDEIKPNDEWIEDLLKGSSRTGNAQVDKDGNALGNVVPSKTGEKFYNNFKDNLYGQEQQKASYKRQTQPVDQAGEHTEKGSLKSKRGKKTAQSILNKLDESVETKKDIKLNEEFDRIQSLMGYNRKTQ

SEQ ID NO: 191 - protein, 211 aa, Unknown
  Environmental Sample
MHHHHHHGGSGSPPQARAGIRRSFASHRVSKERHTMNTKKTIMAASAAVLAMGTMAYAAPGMMRAEGPITLEEAQAKSAEMFERMDVNDDGQLDKADREAHRAKRFSMLDTDGNGSISKEEFAAMHEMRGKHGDREHGKRGHRGGMHMMAKMADTDNDGVITRAEFDAGVAAHFAKVDTDGDGTITDAERKAAHDKMRERFKQAREARAAN

SEQ ID NO: 192 - protein, 329 aa, Unknown
  Environmental Sample
MHHHHHHGGSGQEFFCAPCIAAMPAAKFWLVFGAASVLALGALHLARKQIIKARLIEDMPTSRIRSASQGYVELIGLATGRGQLLTAPLSARPCLWWRYTIERYQKSGKSSSWQTLDKGVSREPFYMDDGSGVCRIEPEGAEVSCLHRKRWHGATRLPDTASLQLKPGLLGGLSPLLSRGRYRYTEFLIRDGDPLYLLGHFVSDASGRRVLTLDQIGGQLIREWKRDFKQLLVRFDSDGNGVLDDSEWRQVQNAARAETHNHQRQGTSREVEHAVSKPEASDLPYLIGSHGQEQLSRRFRWQALAGAAGFLGAGALATWLITSRLGGYY

SEQ ID NO: 193 - protein, 109 aa, Unknown
  Environmental Sample
MHHHHHHGGSGIRVTLISAAALAGAMGASAGEKVTFADVDTNADGMISATEFTAHKTADGKHTEAEAAAKFETIAGMDGQISEEDWDAAMEEYRDKKDDKSEKTDGTSW

SEQ ID NO: 194 - protein, 316 aa, Unknown
  Environmental Sample
MHHHHHHGGSGIDVHGVMWLSPAHYYLFTGLATFAALACLYFMLTRLQRARWVEDTPTSRIRSAAQGLVELNGLLDAGGHEPLLLPLAKRPCLWYRFRVEEHKGNSDRDSQWRTVEQGVSERPFLLRDATGACWINPIGAEVHPKHRRRWEGNQRWPADKSVAKGFLGGLLRKRYRYTEEWFVAQEPLYAIGWFESRGGGRDAVDMNDLSRQVISNWKADYPNLLARFDRNGDGKIDLEEWERVRRAANQAAEQEARTAGQAPVVHALRKPPRRGLPFVLSDHHEEELSSRLRGKSRWALIGLAVSGTLACWLWLA

SEQ ID NO: 195 - protein, 327 aa, Unknown
  Environmental Sample
MHHHHHHGGSGQEFLCAECIAAMPLAKFAVAAVAALAASGFGLYQCGRSFMTSRFIGDMPTSRIRSASQGYVELVGLAADKGAHQSAPLTGRPCLWWRYTIERYESSGKSHSWKTIEKGHSQAPFYLDDGTGLCRIEPNGAEISCLHRKVWRGSQRHPVTATVKKSTGLLAGFRHLSLANNYRYTEYLIRVGDPLYVLGHFESDSTGQRLLTVDQVAGQVIREWKQDFDKLLIRFDDNGNGALDPSEWARVQQTARDEARQRQKTLSPETRDHSIRLPEEKGLPFIIGSHGQEQLIRKYSWRAAGFGSLFLAAGAVSTWLLSSRFLG

SEQ ID NO: 196 - protein, 703 aa, Unknown
  Environmental Sample
MHHHHHHGGSGRASSMRRRSSVTSGRVLSLIAGAFWGIAGFLFGSGLTTVAAAPNEPVRQGPVPLKPGDRGVGQLVAATSFTDLEGRQHAIGDTEGFTVFAATGTSCPLSLRYVPTLVDLVASAPAGFRFVLVNPTASDDPEAMRRDAARVGGVSVYVHDTDGTLSEALGLLTTTDVVIVDASRTVRYHGAVDDQYGFGYALDAPRQTFLRDAIRALASGREPTIAATDAPGCELALSSPVEQAVAATYHGEVSRLLQRHCVECHRDGGVGPFALDTYDDVVAHAGMIREVVGRGVMPPWFAADESPPANDVSVHAAHQLRWANDRSLAASERQALLAWLDGGTPAGDPADAPQPRSYPEGWLIGEPDTTWEFAEAVPVKATGVMPYQNIVVETGLTEDRWVRAIEVRPGSPAVVHHVLVHVLRPGDDGVAHDEREGFWALYVPGQSVLTYPEGFAKKLPAGARLNFQMHYTPNGTATADRTRIGVVFCDEPEHEVRTTGIVNTHISIPPGAANHQEQASIRLPYDATVIGFLPHMHVRGKACRYELTRAGGETTTLLDVPHYDFNWQLLYRLARPLPLSAGDRLTFTAWFDNSQDNPANPDPTATIGWGPQTFDEMHLGYVEYYLPEVPPGEQTAERGWWGRFVSNLERVDLDAAFTRLDTNGDGTLTPDELPERLRDRLMRLDLDRDGSISRQEAARLRRR

SEQ ID NO: 197 - protein, 738 aa, Unknown
  Environmental Sample
MHHHHHHGGSGLSKNTRTRALLALAAGLAIGSAAHGQAECRADLDGDGALTLFDFLEFQNLFASGDVRADFDGDGSLTLFDFLEFQNDFAQGCPTGEVIALELASRSLESYPFADYVRTFDVGETITVAIDPSVATPPVGMVDVYVVASKTADQWALDASLVDARGLPQPLAFGSGSSTADVRVALAGTGLLNADAGESIGVAYDVVIDTNGNGELDAGDLIDGLDGVGFWLFKNLTALGPVAFTRVETFTATFPGIPSTRNQQRLTYPSDIATRSDVPVVVISHGNGQDYRWYDYMHDHFASHGWVVMSHQNDTVPGIETASTTTLAHTDFFYGNLATIAGGVLNGRLDKGRTVWIGHSRGGEGVARAYDRIVTGSYSPVNYALSDILVVSSISPTDFGTRARPGGVIYHLIYGSSDGDVRGSVASGSKPFAIYERGTGDKQVTYLQGADHNDFNCCGFNDFVGPVGTEIGREQAQRVALVDWLALIQHYVRGNEPARDVLERQWESLAFPGIAFSTVDSEFRPARGGDDFVVDDFQTQTSTTVASSGATVVATVSNAFEGLMQDGDSSYTWTGADAMNGMSRVRPGSIDDTRGVTFSWNGSDAAYAYTLLPADRDVSAFAGLSFRACQISRAPETTEALGDLTFTLTLVDGSGVRSTINIGAYGGGIEEPYQRTGDGGGAGWSNEFETITINLTDFLRDGSGLDLTNIEQVRFEFGPGFGSPQGRIGLDDVEFRAR

SEQ ID NO: 198 - protein, 164 aa, Unknown
  Environmental Sample
MHHHHHHGGSGTGSMLKSNGRCAALIVLLALAGNSVAAAPAATATPVGKAAQAVRETDEQAFARIDKNADRMISLDEFKAELQARRQRLAVQRLRRQFQTMDSDRSGGLDTVEFSQLRLVKNAGSKAPAFVAVDSNHDKKLDFAEYVALVSRYAPAQPAAGRQP

SEQ ID NO: 199 - protein, 322 aa, Unknown
  Environmental Sample
MHHHHHHGGSGEEFFCRACLAQMPAAKFALGLSVAVIAAMAGLLLSLRNIRRARLIEDMPTSHIRSASQGYVELMGLASAGETPMLRAPLTDRPCLWWRYTIEKQEKSGKSTRWRVIEKGQSPEPFQLDDGTGLCRIEPAGAEIRCQHRQRWHGSERRPGAASRPITARVLGFGGRFRYTEFLIRDGDPLYILGHFVSDATGQRVMSVDQIAGRLIRQWKQDFRALLARYDEDRDGNLDPQEWRKVTEAARTAAVKVQQHQTNTDQEHSIRRPDDGRLPYLIGSQGQEQLSRHYRWRALATAVLFLAAGALATWMIGARFPG

SEQ ID NO: 200 - protein, 240 aa, Unknown
  Environmental Sample
MHHHHHHGGSGINEVRDTVMFILNKDNNGYLTPSEFNAFSRLSQLEVFEDLYQKVNNWYSKRNNRTSNSGIADIAKHVTEDLEAFVKTGALTLDTGSTFTLPTDTYSLVDVIYSNKSVEKVSNHKITILNNSSLTAPSIYYPAYVDRETKVTLYPDTITSGVSAIYVKLPEDPNWTYYTDLSGNPVFDINNADYQDFELPKEYEKELVLRILAKAGVTLREADIINVVNAEEAKNEQKDK

SEQ ID NO: 201 - protein, 534 aa, Unknown
  Environmental Sample
MHHHHHHGGSGTPSSQGTQNRFCRVALILGALFILTVIPVTGHGKTRIPDTGQTQCFSDTGILSACPDANARYFGQDAQFQGPAMAYRDNGDGTVTDLVTGLMWSRAVDARKVSLDDAQAMARNLALGGHNDWRVPNIKELYSLINFSGSTMGQGHQGGANTAIPYINTDYFNFKYGDTRAGERYIDAQWLSSTAYVSYTMDRNPTLFGVNFADGRIKGYGYAGRGPRGEKKFYVRFVRGNPYGANDFHDNGNGTVTDRATGLMWSQADSQTPMTWAEALAYANASRLGGYRDWRLPNAKELQYIVDYTRSPDTTDSAAIDPVFSATQVTNEAGQKDFGHYWTSTTHMDGPRPDSAVTVCFGRAMGQMRGRVMDVHGAGAQRSDPKTGSNSIGRGPQGDARHGRNYVRLVRGGEAELTLQPAPQDRSAYPFVVKIDPGYEAIGSGNQTMGPGRSGGQMGSGPMGSNQMGGGQTGGPRFVERLDRDGDGKVSSDEFDGPPQHFKRFDRNRDGFISADEAPAGPPPGNGPPRMNDN

SEQ ID NO: 202 - protein, 260 aa, Unknown
  Environmental Sample
MHHHHHHGGSGSQTHATEAALPPVRGTRQRQEPRPKHGKGCDMKRATSTRTIALLATLGTATALLGSAALAHGPGPGSGGMGMGSGMMQGSGMMRDGGMMQGMGMGSGMMPRFEDMDADSNGAVSREELQAWRAARFAAMDADGNGKLTRDEIVAFHQAQAAERFGAMADRMIGHQDADGDGAIGATEFGRVDRMGMMFDRIDRDGDGNVGTDEIEAMRERHSARRGSRGGDDGHWQGHRGYHGQGGWNRSDRDDDRDDN

SEQ ID NO: 203 - protein, 170 aa, Unknown
  Environmental Sample
MHHHHHHGGSGFDKTKSGRIDVYGFSALWKFIQQWKNLFQQYDRDCSGSISYTELQQGESLAGTRCAGTADLSLYSLGQSRGALCLLTTSCPTALQNAALSTGALPTPSVTWLDSEPNPGQGHEQGWILTMKFLGQTDPAGREPWGWKLSSPGHCKAGMCALCGSFLLSF

SEQ ID NO: 204 - protein, 469 aa, Unknown
  Environmental Sample
MHHHHHHGGSGTKGADDEHFTLCRMSCGDPGNHYRIIDGRNRPPRFSIGRTRRLAISRLLRPDFRRPTDTGAVAAVRHSQGRVWQRQPTGLERTAIEMTPRNEMNTPVHPPPSEKRGTTVRQLTQKTLLPLVPILSLLLGLSTAWAMESADCLECHTDADSVGAEFTINSGHFDTTAHAEMGCTGCHESVTDAHPDDGLTPSRASCKDCHDDIYQEYSMSVHGPNATCADCHNPHEAKSATRVAGFDMNRQCSSCHDTDDTVASHKQWLPQASLHIEALPCITCHTGSENYVITMYLIKRDENNRYSNFEVATREDLAKFAGDQPLQTLVDTDNNGLISLSELRAFNGNPAYKGMRLWGMMTPETLTHSYQILDNRWDCSFCHASGPEAMQTSYVAFPESDGSYVRLAVEKGAVLDALNGTPDFYMMGATRNKWLNIAGLMIIAGGMVMPVGHGTLRFLTRKNREGKGH

SEQ ID NO: 205 - protein, 112 aa, Unknown
  Environmental Sample
MHHHHHHGGSGQIIPERTLTAPQAIRAFRMQSQQDAARLQAARGGEVFAARLQAVQHRPASMAGPGTPTGNTLAALLQRLDTDQDGRITPLELRAATDRQAPPAAAPHEPGR

SEQ ID NO: 206 - protein, 279 aa, Unknown
  Environmental Sample
MHHHHHHGGSGLMAINSKKSQRGINLIELMIGIAISLIILTGVLSLMLRVNVSGGEIVQSTRLNQQMRGALDLMSKELQRAGYVNWQTAWGLVDVNGDGVVDILDFYEAVTPVLNEMGRIEVSDSCILYSYDLDGDGGKSTGQFESFGFRLANGAIQMRTAGAGHACDTGTWQAITDSTVTITNLTFDLTYVDDAASGDSTMYAYTVAPGATWDETPLTSCDPLVAGDVPDEGDVICLGRRTVEITVDGQLASDANVTLSLTTRAKVRNDHFNTSNPAP

SEQ ID NO: 207 - protein, 178 aa, Unknown; identical to SEQ ID NO: 153
  Environmental Sample

SEQ ID NO: 208 - protein, 142 aa, Unknown
  Environmental Sample
MHHHHHHGGSGKLAYLFTSALTLIALPACAQGVTSQDAATLVGQADTNGDGNVSKAEFLERRSEAFQDLDADRSGSLTAAEFELAVSQRMKRFSSRAFAKVDTDGNGVISQAEWDQSPPRAFDKLDKNSDGVLTSTERERLK

SEQ ID NO: 209 - protein, 266 aa, Unknown
  Environmental Sample
MHHHHHHGGSGVDTHAHLGLCEPADGELIASAREAGVSRILTVGLGEDSNPVAVGSAQANEGVFASVGRHPNSADGFDPAAAEAIEALCAMPEVVAVGETGLDFYRDRSEPDEQRRAFSAQIAIAARTGKALVIHLRDADGSEDAVSEAFETLDRDGDGVTVVLHCFSAGAPWAERAAERGWYCSFAGNLTYPRAEAIREAAAVVPDERLLVETDSPFLAPQPVRGKPNQPANVVATAERLAEVRGVPYGALERTVEANAARVFGW

SEQ ID NO: 210 - protein, 394 aa, Unknown
  Environmental Sample
MHHHHHHGGSGETVTRKGQRCEDAMSVSGIDVSQGFTGTWQSGLSRVQSRETDYGEMARNLLADRDGNGDGALSASELGMSRSRFADLDTNGDGVVSPEELAAHLEKSGKGDNPALRRMAAAIIQEQDADGDGKISRAESSFSDEEFEACDKDGDGFLTEDELVQAMGGGGGGGLEGAMRNAAEGDGSPAGDDRKGTFPLGEEERKKASGPSVTQDLNGDGVVSAEEMQAVLEHGLAKARAMAARGELRLERVGLADVSGTPEAVGRPDGPGGPGESNGPGAAAETGVAGAVSTASRNGAKGTTGHRGRNAGSAAGTAAAYMTQEMADAGEQTQGAAATRPAPPWLLRRAMDAYGDRMADSAEAYAAGAGTDAAGRPYRERGMPLTGTVFAGQG

SEQ ID NO: 211 - protein, 327 aa, Unknown
  Environmental Sample
MHHHHHHGGSGQDFFCQPCIAAMPAAKFWLIFLAITGISLASLLAAKSNFLKARLIEDMPTSRIRSASQGYVELAGLAISRGERLTAPLTGDPCLWWRYRIERYQKTGKSSSWSTVDRGVSTQPFFMDDRSGICRIEPTGAEISCLHRRVWYGSSRLPATSILNVKPGFLNRLQPLWGSGRYRYTEFTIKEGDPLYLLGHFVSDSDGRKILSIDQITAQLIRHWKQNFNDLLQRFDHDGDGALDNKEWQGVREAAAEEALQNQQTVAGDDADHVVTKPEDSGLPFLIGSHGQEHLSRRFRWRALGSAAAFLGAGSLATWLVSSRLLF

SEQ ID NO: 212 - protein, 198 aa, Unknown
  Environmental Sample
MHHHHHHGGSGTKLIKKSAKAAILMASVGMVLTSTGMDARAETVTEKTIVSQKEIPGVHKIDFMSFDENKDGILEMKEVGDVLFTAFDRDGNGVIDNQEFDENPVMTVIPTEKTTYTFYDYNSDGTAEKAVMTQEDFLKKSSLMRFDTQYNGLSPKDFIGKSFKEVDMTHDNLLDHEEWQRVYADIVKPEAALQSNYN

SEQ ID NO: 213 - protein, 257 aa, Unknown
  Environmental Sample
MHHHHHHGGSGKKSTTLFPLSFALVFSASSVFASASSNFEDETGAPLISSSITVEPVLVEEEKFDPRDKNHDGKVSIGERIHYFFDRDKDGDVDFDDFTYAVKELWGKVKGIFDTNGDGKVEFDEIISGTQSALDHLDSLAGRVLALSGGIQESGYFDLIPEQVKGPLTNLFAIVDEAAEKTQAGVNIGGGYVDQIESALEKLKPQISNLLKGGASVEDMGQAKKDIFAYLEMIKGWYNTGDNAKLVTSIEKKLAKA

SEQ ID NO: 214 - protein, 357 aa, Unknown
  Environmental Sample
MHHHHHHGGSGGFNIVSQALAEESSDDGDSGSGDDDEKESDDQSDDEQSDDQSDDEQSDDQSDDEQSDEEKCVEIEETESDDQPNEETCDNTETDEQSDDQTEQTEQSDDEQSDDQTEQTEQSDDEQSDDQTEDKEAAQNEETSDSVIGSNVPTVLDVILKDDSLLKEVVDDNTTESGLASALTDIQEEQNQPAVETCANEADDDGDGMIDENCQPLTSTPAETCGNSIDDDGDGTIDEEECVVPPTEICDNQLDDDVDGKTDNADEEDCSAILPAVVIESAEDEEGEPLSQGDMIAPGEVTFTFSAKTNETSQSQGNLHDYKFECALDGKSFNSCNSPETVKLTDGKYTFVVRLTS

SEQ ID NO: 215 - protein, 154 aa, Unknown
  Environmental Sample
MHHHHHHGGSGAGRRLTPAPEDEFNIMFLKAFQIMARHLLVVKCAAGAGARTLPPPPDAARPRFLSLPKETPIMKQNTIKTMLIALSLAAAPVAIAQVPAFEELDTDGSGMIDRTEASNLPCLHANFDAISKADPNGIGPDEFSQALNDFCSNL

SEQ ID NO: 216 - protein, 356 aa, Unknown
  Environmental Sample
MHHHHHHGGSGKESQVMHSRSIACAVALVLVATAQLANAQGRGRARGHVVPYRFQEMDTNHDGILQRSEWTGTPASFRSHDWNRDGMLSGDELRIGRGRGARAEGKDDDFDSAYREYNYNDWTVQGFTGLDHNRDNRITRDEWHYALDEFTLADHDHNGWLSRGEFLNEGTNPIDDDRDDRFRYLDANNDGRVSRSEWHGATLTFNALDKNRDGFLTRAEMVGTEPPPDLFTSVDINGDGNISLQEWHWSRQSFDQRDANKDGRLSQEEFRGAAIPASNAAAAYRAGYDRGLIEGRNAGREDRVVNKYWDLEGQRELETADSGYQASMGPKDQYQAGYREGFRRAYREGWDRPTTQ

SEQ ID NO: 217 - protein, 153 aa, Unknown
  Environmental Sample
MHHHHHHGGSGRIRIVFPLAAFAAFLPATGALAAPGGDFERAAQELRDADRNGDGAVSRAEFQQYRVGRWAKMDRNGDGYFSKDDLPALARSRWDSDRLTQLRRDFDKNRDGRISRAEFVGGPMPMFEAADSNRDNQVSKAELQALGQKAKVR

SEQ ID NO: 218 - protein, 98 aa, Unknown
  Environmental Sample
MHHHHHHGGSGMKHHHHHHGPGMQIFVKTLTGKTITLEVEPSDTIENVKAKIQDKEGIPPDQQRLIFAGKQLEDGRTLSDYNIQKESTLHLVLRLRGG

SEQ ID NO: 219 - protein, 252 aa, Unknown
  Environmental Sample
MHHHHHHGGSGKKYIALSLIATAATAHAEPVTITIQGEVFSNRISTGPLATVSSGDTASVTFRVDSAVFFDSVPGDLRNHDVEAGSFAMDFPSVSTTIVSGTEAFFTVVDGFPMSDGFILSTSRFSSGGVPLETTPFQLGFDLGYVGSTLGSLDILEAVGVYDFTGLTRFNFTLWQAFPDNVVMEMDFVSMEIATDACPADLDGDGELTLFDFLQFQNLFATGDLAADFDRDGDLTLFDFLEFQNQFALGCE

SEQ ID NO: 220 - protein, 149 aa, Unknown
  Environmental Sample
MHHHHHHGGSGQEIREAFSLFDRDSDGKLEADDLGSFLRALGRNPTEAQIRQLAETTTSAGFALPDLLGILARMPAVDPAQLERELRAAFKVFDKEGKGMIPSGELRHIVTSLGERLSEAEADEMLKVADPTGSGTVDYEQFIRVIVSA

SEQ ID NO: 221 - protein, 296 aa, Unknown
  Environmental Sample
MHHHHHHGGSGCINGPQSPPRRSNMKIRYFATVTLAACALTLPSMAAEVGTAPKPERAGVQTPATVSAPGKMMARLRAADTNQDRQVSAEEFAAQFPNAPAEQFARLDRNGDGHIDRQDREAASTPDARPERTAKNGPPQDATTYLKKLVKQHDADGDGRVTQAEVEAAKHGFPPLVFGALDRDGDGALTAADAAARTAKAPAAEKPQGEKKAKAKAAGKPQEEMKAAKQEKTTPGETPMKNARQEKQRPALDVNKDGTVTFEEAVQVNPGLTRERFDKRDKNGDGVLTKADRATE

SEQ ID NO: 222 - protein, 645 aa, Unknown
  Environmental Sample
MHHHHHHGGSGSHRVVKGPATGIWRRLLMHMKCFALAVCCGMVACASQPASANVVDATWISNTQFVYRVAFVPDFDQRRSALPVNGSNYCVPTSFINWSAYIARRGNPTQPPGPPPWSYPEISLNILTLGFGMNTDPDGGTNPSGGVAGAANWLSGRAFCFVVTGNTSNGFPRLRTLANNAINGNCLVVPRVGWYNESNYPRITRSGGHAVSMVRAAAAGSANQIIGLHDPNWTPSGDTLTVQSQFTRNDYAVEERLVFEGASAIPTTMSRIMGYGGGYIYGAYYILPYVVLTPVSFNFQVHSLGFSNAGVQTTTISNPSLGAVTSVFQGMTPAEYFYTANNAFSPGGKLARYSITDDSHTTLLELGDDFVDAIPSRFDTIFVMQGRSLLRVNPNNPAAPVEGSQVIGLGIVDLAYDDLNDQVVGLRPGDRRLVRVNQALNGATPILQSIPTQIPVGTEGEIDIRPGDGSVLIATPASTSAYLMKPVPGAAPIVETISIPGNTFPITGGSFTDRGVILVANGRMRELTPDANNVWLLDPTSPFQNIPASTGKIYAGRSRTDVDRATENDPANDDIPSFDFSGATHVIACPADVNGDGVVNFTDLNAVLTSFGQAGANPPGDTDGDGDVDFEDLNNVLSNFGADCG

SEQ ID NO: 223 - protein, 503 aa, Unknown
  Environmental Sample
MHHHHHHGGSGRGIARQGKARQGKARQAIVVGCMTLVALCARSEAGAPGDVNGDGVVDTYDLTALVEAVNARVPAGAAMRADINRDGRIDSRDISDFLALLSGARGDLCEVSYWPCCEYLPPWGCCGDIDICQDDDEKDDVGGPGDFDADGGGDVGGGGGVTFISCDDCDDFRAWGPNYAGPGDPVGAWATTTSPGVFCGRRVSIEIISGAHLLVNGVAGDTPGTVRLRASVELPNGTICEDTHEVQIVRYEPVRLRYATFIECSLLANPGGWIPTVASDYFGGDGRGPSSTAASYRSCHEIDVAPHQFSVSGPETFPYDLTPFGVTNAVAPPFGTSHGYSSSTVVSAPPPCPHSLAAGATPVTMATLAVSAPPMTTFGGSGASFVATYSGNHVSYVRRLSPSVVRVYFWLAGGNPLFVGAPAINGYVRWTLIFGVNQQTGARQSHVSYDGIHNAFPAHELYINGIALYSFSSISAGTTPAALAVPLNEVTSPQFGASVLIQN

SEQ ID NO: 224 - protein, 217 aa, Unknown
  Environmental Sample
MHHHHHHGGSGASRPPVLDRRGLLAGAGAALALAAAPLPARAQIFFDPTLRVLPGILVRQGRGYRPLLDSVGEVRPVTSRTGDLAMPDTSIPVFEFPENLAVFRNYDLDHSRFISKQEAMLAWLTLMAGIRTGQRLGPGDLRQRVAPEGPDVPLYYVELPRTDRRQIWLLLKETPDGATLIRDMETFLSNQIALGRGPVWLNGFRQGGMESGNRRGH

SEQ ID NO: 225 - protein, 272 aa, Unknown
  Environmental Sample
MHHHHHHGGSGSSLHSIQRGFTLTELMITVALSLTVISSVLVGYLGTYSGSMNTLNSSKLNQELSAVMSLMIADIRRAGYNGSVAASETPTANVFNTVDSTALEVFDDMISNTQVATTGNGSCIVYAYDLDQDGVVDANELVGFRLNAGVVQMRTVGNVADPDTCASSSNTWTDLTDSDFITVTTLNFDLSGSVCLNTREPDLVDSDSDGTVDNAEEGNCYVAPLPAAASGDITVETRQVDITLAGNLTDDSFTRLSQAQSVRVRNDLIRIR

SEQ ID NO: 226 - protein, 217 aa, Unknown
  Environmental Sample
MHHHHHHGGSGFLRQGVRVMKKTIIGLALLTTAIAGTAIAQAPARGGDPMGDKTVTKAEAQAKAAEMFAKMDTNKDGKLDEADRAAHQTAMFDRMDANKDGNISRDEFAAAHQRKDGDAKAAGEHRMGEHRMGQHRRKMGGHMGDGMMMGMADANKDGVVTRDEMTAAHARMFDMADANKDGKLTPEERKAHHAQMRQHMGKRGGEHAGHMGHTPSK

SEQ ID NO: 227 - protein, 638 aa, Unknown
  Environmental Sample
MHHHHHHGGSGHCTESRTGMTTLPSHQRTPTQMRAMRHRLFSTNTPTERSVQPVRSELPRRFGRVSLVLLGTVATLVLAGGGGYWWYTRASGQAAGSKSKPILELVARGPFDHVVLETGEIESSSNNEVKCEVKARGGNGTPILEVIPEGTIVKKGDFLCQLDSSALDQEAKTQRIAVSVAESMVISSRAAVEKAVISKQEYLEGTYLTERQAILSEISVAQQNLRKAELALQSAERLAAKGTLKPLQIEAEQFAVQNAKSTLESAQGRLRVLDELTKQKMLVQLDSDINTAKAKLESDETSLMEERDKLAEIQTQIDACNIRAPADGQVVYANKYGNRGGSDFVVEPGAYVREQQTIFLLPDPTRMQVKAKVNESRITLIREGMPVKIRVGAVDNDLFGRVVKVNKYAEPGNWFGPAVKEYAVFVQIIDPPREIRTGMTAEVRIFVEQIPDAIQIPILAVYETKRHHFVLVQNGSAFETRPIKIGGANDKFVTAQTGVKVGEQVVLNPRNHLDKMDLPEIVEEDDSEAFAKLSADVPATASYSPAGEARTQERRNGNGPDIAAIVQSIFERLDTNTDGKISREEAQADSDFGARFEDGDLNKDGFMDKGELMSGMRKMMAARSAGGMGGPPGSRGSN

SEQ ID NO: 228 - protein, 304 aa, Unknown
  Environmental Sample
MHHHHHHGGSGRWQLLSWVYKWDSPKGQRMKHINNIIYVLCTLLLAVSMQLNAATELKIITLQHRFAEDIVLAIEPLVGYDGSVTAIQNQLIIRTQSSNMANIEQVVNALDVERNNLKITVSRQSNLNDSADGFTVNGRKRIGNVEIGTRRFLNNSPDGVQIGIENNQNNTFSSSNQFINVIDGERAFIRVGQSVPFTQEWVVLTNRYISQQTTTEFVDVSTGFAVRPRSIGSQIEVEITPRIAKLNQSGFIDFEELSTVVRVNKGQWLDIGGIMQQKDEVSRAILSRQNAGQNQDNSLSIRVD

SEQ ID NO: 229 - protein, 126 aa, Unknown
  Environmental Sample
MHHHHHHGGSGAPAPDPEALPVTDPGSLQGPAPPEVSELTREEQRFFRYDRNRDRLITRNEMLSTRSDAFRDLDADGNNLLTFEEWAVTTVDRFEGADKDRDGRLTPREFATTAPKPVARKPACKC

SEQ ID NO: 230 - protein, 142 aa, Unknown
  Environmental Sample
MHHHHHHGGSGKTYILSILLLAAAAQPALASPPSAADLDNLLQSGDINGDGVVSKEEFLTLRAGMFPEIDADASGSVSQSELKAVLNDRVSRFASKAFKKIDADGNGAISEDEWAGGPARGFDLADKNKDGVLSADERTRKP

SEQ ID NO: 231 - protein, 211 aa, Unknown
  Environmental Sample
MHHHHHHGGSGGKQNSKLRPEVLQDLRENTEFTDHELQEWYKGFLKDCPTGHLTVDEFKKIYANFFPYGDASKFAEHVFRTFDTNGDGTIDFREFIIALSVTSRGKLEQKLKWAFSMYDLDGNGYISRSEMLEIVQVRPGGGAGPGGGASADPVHSGTMRYSSARLWTFGATWLPAPLSCPSENDWLSPGQRADGDEKSHCWASQVVAAAV

SEQ ID NO: 232 - protein, 152 aa, Unknown
  Environmental Sample
MHHHHHHGGSGESDKAAGRMAISRFLILGVASALLTGGLFMWPGYTQIAAEEVLLDAPPALAAIPVAGADAPKRGPAPPALPASKDASREERRFNRFDRDRNDRISRVELMSSRTAASRKFDKDGNNLLTFEEWAAAAGERFARPMVISRAI

SEQ ID NO: 233 - protein, 592 aa, Unknown
  Environmental Sample
MHHHHHHGGSGVRSRTRIRGAAVTAFTLVAGSATPVLGADATYRVVARTGQFAPGGGFFSTFGAPAITANGRVAFRASAVGVLANRGVWSEGLSGMNNLESVMRLGDELPGLNGTFVATANPEFGGIILNDSGELAFNVRITGAQAAFGDNAIVVHDANGLRSIAVPGQLVSLPCGGLGCQRWMTEVGAEFFAFNNAGEVAYTTTVAGTAINPDNEHLLMFNDGSTNEVVAREGDVPPSTFGVVYSSMRGSATQLNDNGEILMRIYLRDVNINDFYWSVWRGAPGALSIVAAENWTAPMGGEFGDGVFGNIGEMPFNNAGHAAFVQFVEDNQGDNRLGVWRNNNASTQAICFEGLPAPLGLTHRTPATFLQSMNPSGAVAFTTVVEGPGVNADNDVALIRRMPFGLQTILAREGMQAPGLLNGVVFDDVAWSGQQILDDGRVVFRVQVSGPGVHDGNDGTLWITRDGAPPALLLREGQSMVIGGQLKTVGAFILTLSPGSESGRKTSVSELGQTAIRVIFTDATEAIIVASPESVCPGDVNNDGLVDFSDLNAMLTEFGHLGDVVDADLDLDGDVDFTDLNAVLSNFGVNCN

SEQ ID NO: 234 - protein, 121 aa, Unknown
  Environmental Sample
MHHHHHHGGSGLERADTNGDGIVDRGEMQAQRGKLFDRLDADRDGVLTRAEVEQRRERVRRRFAGGDGTVFDRADTNRDGRVTRAEFLSGEMPLFDRADRNGDGRLTAEEIGRVAETVRRR

SEQ ID NO: 235 - protein, 310 aa, Unknown
  Environmental Sample
MHHHHHHGGSGLTRLRRDAANITLPALQVVTVGLMLQSGGGWSFGVPLLLVTALYGWWRSVKTSRLIVDTPTSRVASASQGYAELHGRGKPLDGTPLLSPVNGLPVLWYRVHTERRTSDGKWQHVSTHESDASFLLDDGSGICAVDPEGADLMVRRREVYLSGDDRHTQWSLINGDRLYVLGNFATLGGVSPDFDIGRQIRDLLEHWKSDRPQLITRFDLDGDGEIDLKEWELARAQARREVLQLRDEVMAAPEAHVMRKPSAGRLFLISDLDPADLARRYRWWSWYHAAVFLGGAGAAAWFHGTGGMAF

SEQ ID NO: 236 - protein, 477 aa, Unknown
  Environmental Sample
MHHHHHHGGSGKTMLLAMFAIASGCFAQGSDVCEPQRVVAPADVPTVSMGATVITNGQQWFLSDSSASTFCPGEPLSCGTGAVFVYEMDGNDQLVHVQTIVPHDVQLYDGFGISMDVDGDRLIVGVPNTQWPGSELRQGAAYIYEHNDEEWVEVARLRPPGDIRERFGSKVVIEQNTAIIKAAGINRFHMYEFVDGQWNNIDTISPPTSPIIPDCFACYMAAGGEWVFVSAYFDDALTRDGGSVFVYRRRADGTLEFTQKIVTADVGWFGISLDFDGSTLAVGAIATSRAHFGQGVVRTYTLVDGSWTLEQEITHERAREMSRLGSRVHVSGDTLFATAQGDATSSPTITTILGMTYIFQRDATGSWREAGRLFPNPTGRTLQYGTGIASAGSKVLVGSRLDWDPIEGTTGAAYLFDLTCFDCQPDLDHDGVLTIFDYLTFQTAFGTGDMLADFDGDGELTLFDFQAFQTAFGQGCP

SEQ ID NO: 237 - protein, 148 aa, Unknown
  Environmental Sample
MHHHHHHGGSGKACSTSTGAESMPHTPQRRTLPSFDARSVMLFAALTVGGAAAQAQTPSAPSAQPQYQTGPGPATTQPKATFGGSSTATPSGSSASASAFERADANRDGQLSSAEAGQLPAIANRFQALDKDKNGSLSRTEFEAGSRS

SEQ ID NO: 238 - protein, 270 aa, Unknown
  Environmental Sample
MHHHHHHGGSGPRRFLILSCVLIFRSASGCRSDRKTVAILWMQSGQRGFCDGKGGARRISLQMRVTGLRRKRIKSDPEGGITMKKTVLMTGLAVAIGLGALSEARAQGTQQGAGEGMMGQRMMGHGMAGMGDMATRFEGADTDGDGQLSRDEIVARMTERATARIAAQADRMIEHHDGDGDGMVSIEELQAGPMSRMFERLDADGNGAISPEEFARMREMRQEMMGQSGGGMRGHHGKGYQGHGMKGHGTAKGDGAGEPGVVIHQHFYNR

SEQ ID NO: 239 - protein, 622 aa, Unknown
  Environmental Sample
MHHHHHHGGSGFKRVPIVVVILLISIAMHGQQRGLTPINVNIAGKVTRLYEQSHALVIGISGYDKYGHGWDALRGVKDDVVSVKAALEMNGFNVEVLEDANKEQIDRTISSFISKYGMQIENRLLIYYAGHGHTLPTSYGEQLGYIVPVDAPHPTYDQAGFQSKAIEMAQIEIYARRIQSKHALFVFDACFAGSLFNMRSPVSEAITQRTIHQVRQFITSGSAFQQVPDESIFRKMFVTALTTDEADVDKDGYLTGSELGDFLFKKVVNYSYNTQTPMYGKIRNPNLDKGDFVFELPKFTDTIPEPVAVADSTAKAPVRPAVASTPVAAQKPPSEPMAPVRREEIAMIPSAVTAKSRSEDAASNRGNVGHLMIQSPLDGDLYVDGVFNRVIQANASVPLRGVPAGKRQLELRGKETWVLEVEVRTNDLVNVKFEAREPFYFDLFSVEIADLAFQMSGIQGSDYSTRKDGRDTTVVIPNFAMMCNEVTVWQFRKFIEETGYMTDADKRTNSYASYILRNNSRSAAENANWMHSSDGVIRTPSTFNHPVVHVSWNDAMAFAAWVSEKTGKRWRLPTEAEWEYAAKGGSDFLYAGSDTLDLVGWLWRNSNRVTQAVGQKRTNGYG

SEQ ID NO: 240 - protein, 592 aa, Unknown; identical to SEQ ID NO: 233
  Environmental Sample

SEQ ID NO: 241 - protein, 512 aa, Unknown
  Environmental Sample
MHHHHHHGGSGGPPPGPRRHHVRRARSGRKDPLFPWTRRNHQPRRRPHPSLPGRPPPQFHPGRPPPHRTGGNHRPKILQSFHRHLQPGAPHGWRHRLRHAGLRQKRGRGGRSRLGYPRRHQPTRVSRPDRQPGLHGILLPSHSHRRAGDQQHRFPPLPSHRTPHPRRLAGHSLGLQLEPEPILPSRLVWRRLGTRSPALRRSRRLRPPPRPPAPLRLRLLCFRERRNEPRQRGRGNDGPLRLADGRPRHARPIPWPDPRGIFPHPRNDVRALRRQRGTASSAHAQNPSAPRKGAQGPPLRAGGAARKLARRESRLLPRRGKTAAQSAPLGQCHRQRSPHHRIKTPFRTPTPAEGEKGLTATGGRRQMTQLMKLALAAIGLLSLLSFAGCASSPRSHDSLKALFKKADADGNGKVSRDEYLDFMIGQMFANMEKDGDGYISQDEFLADGGSAETFRKINSSGSGKISLAEAKASPFIRQRLSAPFDEADKNHSGYVTWDEFVAARATALSYVR

SEQ ID NO: 242 - protein, 113 aa, Unknown
  Environmental Sample
MHHHHHHGGSGSNPPGRSIEYWFRCMDLDGDGALSMFELEYFYEEQCRRLDSMAIEALPFEDCLCQMLDLVKPQTEGAVWGRGPGRGMAWGGAQGSGAPEGRGTPRGWRCSGE

SEQ ID NO: 243 - protein, 501 aa, Unknown
  Environmental Sample
MHHHHHHGGSGLMKKMYVYLASLTLLIGPTLAQEFSVIPKNALSGVAIKQIGNQAVKKGCDGDSPKYMKVTVKPSCYGANLRGGGSTIDPQGGPVKMELTVSNNGNTFASDVIFPTKTTWPDNYGQSCSWTPAPGGALVGHSVSCSIKNLTTGSAVNVNYTCDYNKASWFLNDTLSCTRNSDLASQGALNSSVRCLFFYNWKGTGYAATSSYSKKSGIANCGLLDAEDLGPQIGVNMKAGSSATTVNKRGTRGEVVVELDDLSINKRTVYKNLTNGEYETSGKPSSVSVKFFQEVSAGNWKALSVKQEVSMHEFEQCLTVKPSFLGTNQFCGSYYSPLMLFFDNDLPNFRGVSSFPLHPDKAVTNWIEPESKGYFLVYDKDGDGKITSNRELFGNGELIDNGFEALKAHDANKDFVLDKKDAVFSKLMLWRDINGNGISEKNELVALSSKGISSINLYYKDNNIQFQGRAEIKQTGDFTFVKNGKKKKGIVHDVWFSPVQF

SEQ ID NO: 244 - protein, 169 aa, Unknown
  Environmental Sample
MHHHHHHGGSGSSNKKPIAIAVSTALLLSGAAFASTHLSQGYQLGVDTVIGDKGAEGSCGGDKGAEGKCGEGACGMDKMDTNKDGKISKAEYDAAHKNGGGNFAKHDTNKDGFISAAEMKASHEGKCGGDKAAEGKCGEGKCGGDKPAAMSDKKAAEGKCGEGKCGGAM

SEQ ID NO: 245 - protein, 392 aa, Unknown
  Environmental Sample
MHHHHHHGGSGAEAARTRMRALAAGLTILLSGWATSGWAVGNSECLECHGDESLVRSVSTGMRDSLHVSADKFKYSVHNINGIGCVDCHADITTLDWDSDVPHAAELAPVLCESCHVEVGEAYANSVHKKAGSKGITIPCYACHAYHDTTPLAKATVSERQNSFCLKCHNPNNYHDWLPQKESHFAFVECIVCHAPESPRQVNLRFYDLVESKFLDGDVVLRTLGTDRVNFPGLVDRDGDGVVSVAEFEDFVLMLRQRDIRGVFHGELVANIGPQAHQVNRGEVIRDCAECHTVTSPFFQNVKLAFDMDDGSMLSLEAERDVLQTYFVELNVLGSARVRLLDKIGIALIAGGVSVVAVHLSARLLTAPLRRKRREEEAQSKEKTRAGGSDNA

SEQ ID NO: 246 - protein, 357 aa, Unknown
  Environmental Sample
MHHHHHHGGSGKKNGYHKIFSGLAVLLLIALPLSLAAMDSDYCLMCHGDADMLGGSLVIDMATFDTTGHADLGCITCHDSITEAHPDDAVAVSRAVCLDCHDDLGSQYMMTEHANYATCGDCHNPHEVRSLKAMAGYDMNEKCGQCHMQDEMEEVHAEWLPQARLHLAKLPCITCHTGSENYEIVLNIVQRQEEKLFSPFVLPEYEALKAVSGDAPILSLIDTNGDNFVSLAELRRFNQNPKYKNLRLEGTLVPSDTSHELITLDSRYDCTFCHVSGPGSLQTSFLAIPGAAGGYQRVTVEGGAVLDALYGTPDFYMVGTTRSASMNIIGLLIICGGLVMPFGHGLLRFLTRKNRQH

SEQ ID NO: 247 - protein, 391 aa, Unknown
  Environmental Sample
MHHHHHHGGSGMKVYFDNAATTAMDDRVIEAMLPFMKTHFGNPSSVHSHGREVRTAIEKSRKKVAELLNASPSEIFFTSGGTEADNTALVCSVETHGITHAISSPIEHHAVLHTLEVLENKGKIKLSLLDVDQNGNIDYSQLTDLLQKNPGSLISLMHANNEIGNLNDLQKIGDLAKEFGAFFHSDTVQTMGHYVHDLKNLPVDAIVAGGHKFHGPKGSGFLYVRKDKKIHPFIHGGAQERNMRGGTENVIGIIGIAKALELAYEHMAEHQAHIRSVKKHFIEKLNSEIPGVEFNGMSADLDNSLYTVLNVSLPPSESNRGMLLFNLDLEGISASGGSACSSGATVGSHVLRAIGHQAERDSVRFSFSRFNTLEEVDYTIEKLKELYAVEV

SEQ ID NO: 248 - protein, 221 aa, Unknown
  Environmental Sample
MHHHHHHGGSGRSIVGTGRDVQFIQPCASWPMRSGGQGFPATAAGVKLARTPDLFTERFVPRTQMIAAVLLGPMLATIGASGASAQTATGSNVPRAEYIATMDVEYRKMDGDKNGKVTRAEIESFERGVALGQARARAQAMFVQLDADRNGQLSAAEFGKMVSGSPQVDGRPLLGKLDTNKDGAVSLIEHRAGKLAYFDQIDSDKDGVVTVAEMKAAGVIK

SEQ ID NO: 249 - protein, 325 aa, Unknown
  Environmental Sample
MHHHHHHGGSGGACPGWHAMCEGHFAPRAIGDDARAPGGKGPTMKISSENAALALTQTNPSGASAKRREAAELEAAKAKSSDARTIVDTVELTDAKPAAQVSRSDAQSSPPVAQANAGAPADPIADILKAFGQRSTDSGFSSAADVNGDGVINFADLNATLNKQNTEGEAEPPTGGPLPVEPDPLAPTPASLDADEGGAIDAPTGAPASTTDEKAEGPAVFTADDVDRALGAFGASEGDDAFNSAYDFDNDGVINFGDLNELLNRIGAGANAQQTLLDQLTERFGASNGEERFNANLDFDNDGVINFGDLNTLLANLAQNPGGDE

SEQ ID NO: 250 - protein, 140 aa, Unknown
  Environmental Sample
MHHHHHHGGSGMPCTMRWPTERNGAISVRASRGREGQGIAPMLSLMLAMAAGAAELPSVDAMPSALRYPQATMFLEREASLKAWAVRTYDSNRDGWLTLYEAQPAMAAFKEIADSDRDGRITTIEYRRGIEFITARWAAQ

SEQ ID NO: 251 - protein, 155 aa, Unknown
  Environmental Sample
MHHHHHHGGSGKSTLMKKTLGLLALGLIATGAQASWDRDEHRYSGRAYPQSQLFSEKVDARQDRQKARIMAGMREGRLSRAEFRRLKQEQREIRAMARYFYADGFINPHEFRRLDHALDIASHNIRAEMHNRQARSAYGHPSRFNQARHRACRYS

SEQ ID NO: 252 - protein, 134 aa, Unknown
  Environmental Sample
MHHHHHHGGSGAPLRSTGHRLQTRSYTMNRIAFAALVAAAAVVSNAEEAKKPEAPGFPPRDNMRAEALKQFDKDGDGKLSDAEREAMMAARRNMGDKMRQEREKQFDKNGDGKLDDAEREAMMAARKEMIDKIM

SEQ ID NO: 253 - protein, 687 aa, Unknown
  Environmental Sample
MHHHHHHGGSGEKRPSMTHRPLRTIACIIVSLALSVSAQQAEQPSLPEKPADLFQATRVWNVHLTFTPEQWAAMEPRQTERAPFGGRNDRRGPMVFGPGTFLAPVVLKAADANQDGKLARDEFATLADRWFGEWDKLKAGQLNLEQLRTGLDATLTQSGAALQPPVARSFLLGQEGQRNGLSSSRGIEFDYVHADLEFEGQVIKDVGVRYKGNGTFMQSRGDLKRSLKIDLNQYVKGQKLADQTQLNLHTNVTDPSWMNEVMSHRLYRDAGIAAPRSAYARVYVTVPGKHDRQYLGLYSLIEDVGKSFVEERFDTKKGAIFKPVTPAPFTDMGDDWAAYNQVYDPKLDLSKKESARIIAFCKLVSHASDAEFAEKAPEYLDLDQFARYMAVTVYLSTLDSILSVGQNYYVYLHPKTEKLQFISWDLDHSFGQFGMGAGQDEREQLSIHRPWRGDNRFLERVFKLDAFKQFYFGHLKEFSQTIFKPERFHQQVDEIAAAIRPAIKEESEQKLARFDTVVAGKPAGPEGLMGWFRGPGQSPKPIKGFVSARTPAVIDQLAGTSQGMALDGGGFGGRGGRGGPGGPGGMPSPGAFIAPAMMMSLDADRNGQLTRDEFTQGFARWFAAWDLSKTGQLTDEQLQIGMARDLAPRDMRGGGRDFRDDRGGRDNRRGGGGPGGFGGGFGPPRGQ

SEQ ID NO: 254 - protein, 838 aa, Unknown
  Environmental Sample
MHHHHHHGGSGRVGVYFHRIAPDKLLWAPPMMADQPISSDTACPLATHSFTTPAWRYAVVTGAGLMMAGVLLTAACLRAEDPRETPSPTGSVDHLLDITSVWTVRLNFTAEQWEAMEPAMGPGFPGGPPAGPGAFGPPRPFGGPPGERGPAIDFGPGTFIAPIFMSHGDANQDARLSEEEFGELARRWFAQWDTNDAGLLTAEGIRDGLNATMAPPGGPGGFGGGPPRGPGPAMSFQAPEGRRNGIAGVMGLDFPWVLADLDFEGQDFPRVSVRYKGNGTFLQSRGSLKRSLKVDLNKKQAGRKLCGVSTLNFHSNVTDGSWMNEVLSYRLFRDAGVPAPRTAYARVYLTVPGKFDGEYVGLYSLVENVDKNFAVDRFGTKKGAIFKPVPARLFEDLGDDWKDYQQAYDPKTPVSDEETRRVISFCKLVSHADDERFARMLDSYLDLDQFARFMAITTWLSTMDSLLATGQNFYVYLHPQTRQFQFIPWDLDHSFGQFYPIGTQQDRENLSIHRPWAGENRFLARVFAVKKFKRLYEAHLREFSKTICRPERIGRQVDELAAVLRPAVGEESQEKLARFDTLVAGEAVGAMGWGSGPPVSPPAPSAAPGFGPPPASGFGPPPGGSFGPPPGSFGAPPGSFGPPPGSFGPPPGSFGPGSLAPPPGSFGPAPGLFGQPVKPVRGFVEARAKSVDDQLAGRAEGTVVAPFGGGGPPPQPRQAGAPAPAGFGPGMFLGPPLTAELDEDQDGQVTREEFEQGFQHWFHTWDTDETGVLTEQQLRAGLNEMLLPQPGETPFGRGWGPPGAPAGGFGFGPPGMFPGGFGSGPPGMIPPSPPTERE

SEQ ID NO: 255 - protein, 115 aa, Unknown
  Environmental Sample
MHHHHHHGGSGMKHHHHHHGPGIYGLDWDNGETEDLANYMQIFVKTLTGKTITLEVEPSDTIENVKAKIQDKEGIPPDQQRLIFAGKQLEDGRTLSDYNIQKESTLHLVLRLRGG

SEQ ID NO: 256 - protein, 247 aa, Unknown
  Environmental Sample
MHHHHHHGGSGLLTDRAATGAAIREGLRWLADKTDRSSVAVFHYSGHSKKWRGVDRDGDGEVTDEGLWPTDDDFIVDSELVALLDPVRPSAFWISFATCNAAGFADPGLAQPGRVLTFSSGEPQKSYENPSWGHSVWGWFLIEQGMRAGLADLDGSGRVSVEEAWTWARPLAIDATRSQRHGSQDAVIVDNLDGELNLGIPGAPPPASRPAPEPAPAPTPSPEQPAPSPEPDREPDRHGGYLCVLCG

SEQ ID NO: 257 - protein, 347 aa, Unknown
  Environmental Sample
MHHHHHHGGSGKKIIVLLLALLLSACEAQIITVPVFIYDNSDAYMAEFESNIRLAALPMDYLIRSFNSQNSQIIQNDQIDPFMNKDYPVLMINPVDRLSVYAIIEKAKQNDSTIIFFNREPLPEDLALYDKVYYVGADAVQSAQLQASLIMDLFGNDPKNLNEYDKNQDGIIQAVILKGEQGHQDAEARTKYVIETLTESKYQIEVLDISSANWDKEIAQTQMEELIPLYGDKIEILISNNDAMALGAIETLKTYKFFDDLNQDGVIDRSTEPWLPVVGIDGLEVSIESIKQGYLYGTIKNDSESMADCLVQLADWLLKGKSLENFPYTITDGKYLWINYQKLSLEE

SEQ ID NO: 258 - protein, 653 aa, Unknown
  Environmental Sample
MHHHHHHGGSGRWTMRKMRFKAGGRMLLVSLACCTLMLSAIACGAQANGSAGADDNRLPAEWVFDRRRLWEAHIRISAEAWRRMQPEQARPAARGILGNLMRGLTGAAPATRPANAEYERRAPNHFGMEYTYVRGVFEFNGEVHGDVGIRFKGVSSYTTARQSLKRPYKIDFNRLLDDQEFHGLQQINLHNNACDPSQIREALSYWAFREAGIPAPRTAFVLLFLTVEGEHDRVCLGVYTLVEEVDRRFLKSRFGTKDGFLIKPEAGQLPYHGDNWSQYRGFQPRTDGSEEEIRRIIELARIIHRESGEAFREKIDQAMDVDQFLQYVAVNGMIANLDSILAIDHNFYLYAPPDGAKIIWLPWDMNLTWGAYQRLGGWDELMEMSIRKPWAGNKPLLDKVLAVDEWRKAYTEHVRRLTRTVLNAERVRAEIDAMEVAVRDGDCRAGGAIMDGNPPDVSWTPSWKRPASPMVFAEGRWQSLEDQLDTPADAADIAYVPRFRTGGLQRGSRPSVPVPPEMADAAFAAIDASGDGKLDGDELTEAALTLLFSSGGGGDRATTIRQAEIVSALEKLKLSELRSEPARGRRSPRRGSTPASVAGTILYEADRNLDGQLAQPELRATIARLLYENDMDDDGRLNSMEFAGGLGRFLAGW

SEQ ID NO: 259 - protein, 130 aa, Unknown
  Environmental Sample
MHHHHHHGGSGKKAVLMAAMLLFFGVSQASAVTYQYDAKGQLTAVIYNPGKRIDYTYDAAGNRTTLVISLEAGDFDGSGAADLADAVTVLQVISGLKPAQAMDSAGDVDRDGKIGLPEVLYILQKVAGIR

SEQ ID NO: 260 - protein, 227 aa, Unknown
  Environmental Sample
MHHHHHHGGSGIDAMCAEQDAKTAQRVQEWDRDGDGFITLQEGSEGLRTNLTRFIDEHLKADVDGDNRLSREEYALAVPDSEGERQADGLTKRQQIMFRSADSNEDGYYSKAEAVASLSYRQYHSYKGRATALRARAFDLDGNRVYDETEFGLVYGVKLGDPLPREIREKYLGKGKIAPNHSYYGMMMRIVHMPLAEMAKIESRVDGFLKDLHSKRNTAPRNTEGLR

SEQ ID NO: 261 - protein, 165 aa, Unknown
  Environmental Sample
MHHHHHHGGSGAVSRFLIGGVASALLLTGGLFLWQGHSQLAEEVVLPDPPPALPAIPVAGANAPTRGPAPPALPAAKEASREERRFNRFDRDRNDRISRVEMMSSRTAAFRKLDKDGNNLLTFEEWAVATSERFAGADADKSGDLTRAEFATTAPKRAAKPKCRC

SEQ ID NO: 262 - protein, 157 aa, Unknown
  Environmental Sample
MHHHHHHGGSGRRMLAGSAATLLLVTGAVLIWQGRAESPEIPAAPQPRLASAMTPVSLARVPDAPSADPKSKEEKRFARADKDENGRITLAELVEPRRKTYAKLDLNQDGKLSFEEWAVKTIDKFGDADADKNRALSPAEYATTAPKRKAKPACACG

SEQ ID NO: 263 - protein, 941 aa, Unknown
  Environmental Sample
MHHHHHHGGSGRTSISSKHKPIHAAALLIAAGFLWAALGSQTAYGVTAAPGLHTYEQPDGTRISYYLRGDEHRNWQETKDGTLIKMDPRTGYYCYAKNVLGHVYRSNARVGIEGKPSFSVAGTGALLSPAFSADSPESAGAMSIQSAPSLSGSVSVPASQPVLVLVVNFTNISSIAPAGYWEKRFFSDTESSVDSYYKEVSYGKTGMVPVAETAQTANDGVVMVTLAQAHPGTDGYTSDVGSQVPDIVRKALQQADADVDFALYDQDGNGKISPMELHIAVIFAGGEAATGAYYKSIWANAWEYSSLSVDGKTISHYIVAGERFGDSYGNPSTTLMTMGVFCHELGHSMGLPDLYDYGYDSVGVGGLSLMASGSWGSGSGQPGASPVHPDAWSKIALGFVSPDLGLPGTEYLLNDTGSAEFNILKISNPSAPGQYFLLENRMGRGYDAALDEFFNNSGIAIYHVDENVMDYANANPYAFPYFNDNRFRKGVDVEEANFGILGYGELDYYGSNRSEYINPSPASYKGYTFFALGDSGKYAAAFKESTQPGSRFYSNPVGASIVPPLVYDATTGGDWYFESDSSVGIQALDSGINLDILDVAQYTMRVRYNAASYTVTLGVNPAAGGTATGGGSYGPGAAITLQAAPKTGNTFAGWWEGSTLLGAENPLVMEATRNMDLTAAFRANNYTIKLSGNGATSGTMGSLAMTYDASKTLTTNAFKKTGYAFLGWATSSTGPVVYKNSASVKNLTATANGTVTLYAKWGAPVVSAVSSGYTSIKVSWAYAGSATSYKIYRATSATGTYSLVYTASSTARSWVNTGRVTGKTYYYKVCPVAGGKTYVFSTYKSARAVPSTPTVALTKPSSTSIKVTWNGISGATKYQVYRSISATGTYYLVYTGSSSARSWTNSSLPKGRTYYFKVRALHLVGSVYVYGSFSSVKSLSI

SEQ ID NO: 264 - protein, 215 aa, Unknown
  Environmental Sample
MHHHHHHGGSGDTAAKPPSLPDTPIFKDLPATGDALFDRAVRVVFKHEGYYSNDPDDPGGYTKYGVSLRTAVTIGDLDGDGRLDLDFDGDGDVDAADLRRMTALQALDVYKRAFWSPYPYGGLPPQTAVKFFDLSVNMGHRQAARLVQRACRACGARVTDDGIAGPATIAAIHSTYQPALLAALRSEAAGFYRLLASQRPASVKYLTGWLNRAYY

SEQ ID NO: 265 - protein, 570 aa, Unknown
  Environmental Sample
MHHHHHHGGSGIRFSLRNKMSLMSGHLFIIFLRTSLLFFSFIYASLAQSSEAQEAHQNSPRQFILSIGISSFDSPFWKKLNYAYKDAEDIHHFFEGHTKYNRLLGQKEDKKGRVTRREIRDALRELRSRNTHPDDTVLIYISTQGSVERDHYGRLTGFLVTSDSQPQNIMNTALSNEEIFSWFRSMRSRKKILILDTGYAREGKSRIPLQIEKSLSDKKARPYFLPESTRVEGGAILSAASWGEAATEDPFLKNSLYTHFLLQGFRNDKNGDGVVSISEAHCSAARQVLQLSEARQHPTATMELVEGRPIIVSGNPSRLHKARLISLSQQNEKLRVLVNGKEAGTLARGSLDLPVGPLRVSLFDPDQKREIASRHVFIRPGREYLAGDILGRQQNNSLEILPIFQRIHPTQDTYSYTKEADILHGLRYRHYENDFGIVVSALYLPEAYEKGPRNRAYRYQTKRGYAWDIGFGGRLPLPSRLASLQNALIYTSGFTQSRIFREVGLFSLEKKKTTEDFPGGFLRAGLSSSLPDSSFSMSAEAEIALVRNALTDSPSALIQERLMIGLGFIW

SEQ ID NO: 266 - protein, 148 aa, Unknown
  Environmental Sample
MHHHHHHGGSGIVRTLIAAGAVLAVAAPAALAQTAAAPPSGMSLQQFQAANGDKMFARLDANKDGKISAEEFAAFREGNAKVDAKAGKAGKRGQRMFARFDKDKDGSLSRAEADEVLAWRFKRMDANNDGVLTLEELQAKRGRAKVGI

SEQ ID NO: 267 - protein, 140 aa, Unknown
  Environmental Sample
MHHHHHHGGSGTGAPEYSNTFAGGEDTGEARGTRRLSAARKQFHNRQETIMKLASTLSATALTLALIGGIASPGAFAEVPKAPKDIAAMDTNKNGRIEKDEYVKAMSAEFDKTAGNKGYCTFEEVAEGWRQRVIALERNP

SEQ ID NO: 268 - protein, 384 aa, Unknown
  Environmental Sample
MHHHHHHGGSGLINYFDNASTTKVDSRVLEVMLPYFNEFYGNASNNHLLGKTSKLAIDEARKQVSKLINANENEIIFTSGATESINFALKGFIESNFEKGNHIITVKTEHKAVLSTCEYLEAKGIEVTYLDVDNDGLISIEDLKKAIRNETVLICVMFVNNETGIIQPINEIGLIAKDNNITFFSDATQAIGKIKVDVETENIDLLCFSGHKLNAPKGVGVLFKKKNIRLTPLMHGGSQENGLRAGTYNTPLIVGLGKACEIALMDLDSDKDYIAKLNSFLIQQLKEINGCVIIGDEKFRVSNIIDVIIPGLNSDIFISKETDFALSNGSACTSQIIESSHVLKAMGFSDNECNQTIRISISKETTEIQLKELVDSLKAKIKSI

SEQ ID NO: 269 - protein, 429 aa, Unknown
  Environmental Sample
MHHHHHHGGSGANTIQFKRRVSGNAGAPAALKSGEVAHNEVDNILYVGKGDDGAGIATSILPLAGKGGFVDLSSAQAVAGKKTFATVPASSQDAAAAADLVRKSQFDSGLGTKANTSHSHAISDVTGLQTALDGKAASSHTHAAAQISDSTLAGRALLTAADTAAQRTSLGLGSAALDDASDFAASVHGHTVADVTGLQSALDAKAPLASPALTGAPTAPTPAGNDNSTRIATTAYVQTEIAGLDSGDMHKATYDTDNDGKVDVAELADAVPWTGITGKPSTFAPSSHSHPISEVTNLQTTLDAKAPLASPALTGTPTAPTAAGGTNTTQIATTAFVASAVSALVGGAPGALDTLNELAAALGDDANFATTITNGLAEKLAKASNLADLTDVAAARSNLGLATMATQAASNVAITGGAITGIAFDCGTF

SEQ ID NO: 270 - protein, 134 aa, Unknown
  Environmental Sample
MHHHHHHGGSGKTRKPKELEPDSIYAYLDVNNDGIISDEELAKAKEIADFEHKRALQKNEDANEDQIRKMARFAFWVMLLYPAGIMLSSNFCLESSASLLSDIAPTYFVAIAGLVAAFFGAQAYAKSNSNSEEY

SEQ ID NO: 271 - protein, 236 aa, Unknown
  Environmental Sample
MHHHHHHGGSGPHLGGVLGVGQIFVPTRDGTTGERRFRVMNGRQFRLARTDWREPMRLGFKTSTAMMAALMAATLSTAALAERAPMGGMLMNFDALDADQNGQITKEELAARHAARFAEADADQDGKLSAEEMIAMRDKMQAERKAARAAAMMAEMDADQDGFISPAELPGSAMMDKMFGRMDDNADGAISKEEMEAVQARMQKRMGGEKGHGKGHGKGHGSGERGGFWQWMGGDQ

SEQ ID NO: 272 - protein, 257 aa, Unknown
  Environmental Sample
MHHHHHHGGSGGPDPRPPMNAHPALRQLATNWPRFGIIARQEGARTANGSRARVSPLPFPFGAASTTPGGTFRRTTTMNKLLVGLALAATTTGAAWAADHAAGHQRMAEPQTRAQAEARAGQMFDRMDANKDGRVDAADRAARQAAMFDRIDADRNGQISREEFTAHHAAMGQRREGQREGQRMGHHRGKHGGQHAMMGRGMMGPDGTATRAEFTAAALARFDRMDADKNGTVTMEERRAARESMRQQRSAERNKAG

SEQ ID NO: 273 - protein, 179 aa, Unknown
  Environmental Sample
MHHHHHHGGSGVLLLWIKNFTVLTFLGKNLTIFYRHIFFSKVWCLNAQYNELILIIAHQMIRLLRSVVMQKTRVWLGIFMLVSASQFAYANHHESGDDKHGEKCAGMAHGDFSISGLDANKDGAITKEEYLTGDKNNTEKTFKHIDANSDGNLDKAEQKEIEAVYKDIHEKHKAKTTRM

SEQ ID NO: 274 - protein, 256 aa, Unknown
  Environmental Sample
MHHHHHHGGSGFLAKAILEGANQGLGQALGGLLGGGDQRRGGGDIGGIVGGIVNFISEAAAAQYTPEPPPTQQHFTNVEANESEEVRRFRQQFAQLAGPDMEVGATDLMNILNKVLSKHKDLKSDGFSLDTCRSIVSVMDSDTTGKLGFEEFKYLWNNIKKWQCVYKQYDRDQSGFLGSSQLRGALQAAGFQLNEQLYQMIVRRYAEEDGSMDFNNFISCLVRLDAMFRAFQSLDRDADGLIQVSIQEWLQLTMYS

SEQ ID NO: 275 - protein, 248 aa, Unknown
  Environmental Sample
MHHHHHHGGSGLMTRLLIGGVIAAAFAASIPAIAQVAPGAAAPQPGPAKAVKSRAEVQSAVARRFERMDSNRDGFVSQAEAQAIHAKRGERRQQRAEGRVDPAAIFARLDANKDGSITRAEADAARTARAVARGKPANAHAVAFGNLFERADKNRDSIITRAEFDAAPPKGGMAGKRGGARHGGKHAGMGGRLFTMGDANKDGRVSLAEAQQAALSHFDRADLNRDGQVTPDERRQSRQQRRAQRQPG

SEQ ID NO: 276 - protein, 160 aa, Unknown
  Environmental Sample
MHHHHHHGGSGGLIVAPERAAGASRLHLVTTSCRPETTWAVVGDTLGNMTGRSTEKELSMKIVATLIAIALVSAATLVMAEQPANPQGRAAAAEKMKAADTNGDGLISRAEAAASLPRVSKHFDEIDANKDGQLSREEMRAFHEARKAKHRVEGEAAAPK

SEQ ID NO: 277 - protein, 327 aa, Unknown
  Environmental Sample
MHHHHHHGGSGGNNREVPDVFLFCHNFSCLNRVRWMMQRLIAVIVYFLIALCFSGNMAKAQELAALPDKIQGHWALPDCGIYDEALLFTRHFYLKSSSDGLSLRPAGLDRQAEDYMILSLSGAAAPVQVENDGILTLGVLERPPARRTRNWPRQWEKLPHDQTVEYTACTEAPSVVPKNMVRLMRFVDRLRDACAITDSKGCARVAFKLADSDNNSRLTRAEIIAATESLMLLAEMGVQTTLDAVAVSAVKERAKTEGGKIADDLMIRYDANTSGDLDYNEIVENFTPPALPVIREMASKAGNLLPALKVAGAVMPQESPALRRKDY

SEQ ID NO: 278 - protein, 441 aa, Unknown; identical to SEQ ID NO: 179
  Environmental Sample

SEQ ID NO: 279 - protein, 186 aa, Unknown
  Environmental Sample
MHHHHHHGGSGSISWAPYINLVLENRTAFAARLLEIAHRLGILPGWLMIVFYLETAASKTGKIDHRIRNSSTGATGLIQFMPVTATALGTSTSALQQMSNVDQLTYVEKYLTPYKGRMKSLTDVYLAVFFPAAIGKPDNWVLQAPRLSAQTVARFNPLYDVNRDGQITVGEIKSKLVQFIPPGFQL

SEQ ID NO: 280 - protein, 181 aa, Unknown
  Environmental Sample
MHHHHHHGGSGKCWCNLERRKLAATPFKSLNPSRQKVVMFRPILFSALAFVLISGSAQAQMMGRGPDPDLNRDGKVTQAEFRKSQTDALLEAFDKNRDGQITRAEFKPMEDMARRFRGAGGAARAAEVWTRLDANRDGVITRAEIEASADRRFAASDADRDGILDRAELTSLRQSRSSGGS

SEQ ID NO: 281 - protein, 154 aa, Unknown
  Environmental Sample
MHHHHHHGGSGKELDQPAAELFRTYDRNQDGALDEEEFRQIKSARSRFEELDLDRNGRIDLDELRQAASRRFQACDANGDGRLDAEEIRACGSGRPARGESQPITKKERTVDLFDRHQQDRALTRALQGGDEERKIPTNPRYQPPVSPVFSVFF

SEQ ID NO: 282 - protein, 178 aa, Unknown
  Environmental Sample
MHHHHHHGGSGEAPETEESMNAIRLSLAAGALAFGGILFAQTTSGQDAPAAQQPAAGAAVEAPAGPGYGPRDGSGPGERMHRHHHSGKHGHRGGMMKGADENRDGKVSRDELLSAQKRQLAMFERADADKDGTLTRDEMRAAREAMREEYRKRKGEPRRDGERRGPGAPQAPAGGTQG

SEQ ID NO: 283 - protein, 310 aa, Unknown
  Environmental Sample
MHHHHHHGGSGLVRLRRDGFNLSLPVVQLGLIAIALSLDSRPGRLAALLLLLVSGLFGWQRSVRHARQILDTPTARVASAAQGYAELRGCGQPLGGVPVLSPLTGLPVLWYRLQTFRKQHDGKWRHEATTESDASFLLDDGSGQCAVDPEGAEMLVRRRDVIERGELRQIQWSLLRHDPIYVLGEFATLGSITPDFDIAAQVRELLAHWKTDHRALLQRFDHDGNGEIDLDEWEHARAQARHEVEQRHRDLDAAPEAHVVRAPADGRLYLISDLEPARLARRYRLWAAFHLAVFLGAAAASAWFAQTVIP

SEQ ID NO: 284 - protein, 674 aa, Unknown
  Environmental Sample
MHHHHHHGGSGKISAPCSASPRGAAPRRGRPSSRPRRPPILVLAAVALALALPTGGAFAQGRPADAAEAARYAPAVRSYVEAARDYLALGYPAEAVRLADAALALSYQSSDARYLRAVLAKANGEPARFVEELLAEAFAGSNFELYRRDDAEILYASVLVDTRRPDQALRFIQAKPRDAATLYIEARARMALGDRSGARSAVERSMRVEPFDPRALVAWLKRGEPLASDPADAALVAKAFDSLDSLRDIEPGLVLALVPYAYDAGEARLLLREYRANGGSDPLASVLALEYGLLSPSSAVAELFSAGFIASEDLRKLWRLLPDDGARADFLRAFASYGGLVYDDANRDGVPDAYTRYEAGLPVAYALDADQDGRPELSAAFKAGEPSAVELVAGSVKAAIEYGRWPFALAVLMADARSSRRFQFGPVAYRYEALIFEPFGEGPRPAAAPRPALIRPSGLAFPAERAIAGAAFRVEERAGSTVLNATLDDGLPVGLHWIDAGGSRGYRRYEDGRPRIEEIDADGDGRVEARKRWPSPGSSAAPLLEVDTNGDGLFDYRETLAAPFLRSWDLDGDGAPDFTIEELPDGRERRGLSPSWRDAPPLAAYYRDGRLVELRVGGESKGLIADAGGRVRWIGRKPFDLGPNPPPPGSYQRDGLRYALIRVGDEYLAEVLAD

SEQ ID NO: 285 - protein, 384 aa, Unknown
  Environmental Sample
MHHHHHHGGSGNDSIRNLFIAAQNYTYLNSAAVSPLPATAIRGVISQMMDVASNGSMGYLGWLKHKDSARSLLAGMMNVRPEQVAFTRNTSDGIATIANGLPWQQGDNIVSFEGEFPANFYPWRRIRDEYGVELRLCPERDGRIDLDEFCAMIDHRTKVVAISAVQYASGFKADLERIGRAARAVDALFVVDVIQGLGAMAFDLPAQYVDAASGASHKWLCAPEGCGFLYLSDRARERVKPTLVGWISVETPWDFVDREQPWRSTALAWESGTGTSSLFYGLEQSLKLLTDTGLDNIENYVNSLADQLCDGLGGKNYEIISSRAPGEKTSIVCIRHRNGHTSSEIASTLEKQKIIVSPRGDRLRIAAHFYNNSEDIDRLLEALP

SEQ ID NO: 286 - protein, 310 aa, Unknown
  Environmental Sample
MHHHHHHGGSGLVRLRQRRLETVLPLVQFAAIAVAIHADTGWGSVAALAVLLATGFFGWMRAIRHARLIHDTPTSRIASAAQGYVELRGRARALGGTPLLSPVNGLPVLWYRVVTERKRSDGKWYRVSTAESDTSFLLEDGSGSCAVDPEGAEVMVGRCDVTTRGDTRYTQHALIGNDTVYVLGDFATLGSIDPDFNDREQVRELLASWKKDHPRLLERFDLDGNGELDLQEWELARQQARREVERRRDEAMAAPEAHIVRRPTDGRLYLISDFDPERIARRYRWLALFYIVLFLAAIAGLAWFSQVGII

SEQ ID NO: 287 - protein, 146 aa, Unknown
  Environmental Sample
MHHHHHHGGSGFWWQGRAQVESTAPPPPEPEAAAPDPGVLPMADPGTLTGPAPPEVSELSREELRFFRYDRNRDRVITRDEMLSTRTDGFRALDVDGNNLLTFEEWAVTTVERFEKADGNGDGRLTPREFATTAPKPAAKKPACKC

SEQ ID NO: 288 - protein, 204 aa, Unknown
  Environmental Sample
MHHHHHHGGSGIRTAAFALLALTFAVPTSVVSVRAAPPAPPATAETPPTAAVGRFDRFVASSGPTCQREASGRCVDLGLAFADRDGDGRLSVDELDVVRRELKAWLAWKGPKLTAAERTGASLGVWLVDTAGLPALFDSFDADADGRVTRGELLADVRLDHRPLGDVLLDPQAVDRSAVASRVGKLAPFLQGFFGMGASAAPAR

SEQ ID NO: 289 - protein, 177 aa, Unknown
  Environmental Sample
MHHHHHHGGSGPASDGAARKRKVEAMRNHLIPGLRALIPVLALGLGLGAVSGAVAAGDEVRTGAARAERAFDRIDADGDGMLSRAEIERARAARLARLDTDGDGAVTEAEMRAAAEARAARRVAKRFARLDANGDGRIDAGEMAARGAARFERLDADGDGMVSRDEMRAAHPRRARE

SEQ ID NO: 290 - protein, 234 aa, Unknown
  Environmental Sample
MHHHHHHGGSGHIHIRLGTLTVALGLAMAGSVIAAPQNAPAPAERGHGAMHRTHANLDANQDGVIDRSEAAAHPRMAAMFDRLDKNGDGQLDAGERPGKHGGKGKGGRGGHGMHGAGAMDWAVRLDTDGDGRISKLEAAQSRMAERFDEIDLNRDGYLVASEVRAHAAQRRSEMVARRQQAMEAKFTAADTNADGRLDRAEVESAMPHIAKVFAFLDEDRDGFLTRADIAPARR

SEQ ID NO: 291 - protein, 123 aa, Unknown
  Environmental Sample
MHHHHHHGGSGPAECRPRRRALPAVVLATLLAGPAGGSDYFSVVDLDGDGRISLAEFLERMGYAFGQMDLDGNDVLEPHEQHVPNAPRITRAEHEARFTAQFRRQDGNGDGYLSRAEFLAPPR

SEQ ID NO: 292 - protein, 437 aa, Unknown
  Environmental Sample
MHHHHHHGGSGQHDTSKRLFQEALQLIPGGVNSPVRACRAVGTEPLFIERAEGCHIYDADGNGYIDYVGSWGPMILGHRHPAVIEALTHTLAQGTSYGAPTALEVELARLVTAAVPSVEMVRMVNSGTEATMSAIRLARGVTGRDTIVKFDGCYHGHADSLLVDAGSGVATLAIAGSPGVPADFVKHTLSIPYNDVAAVETVMAERGDGVAAIIVEPVAGNMGLVPPLEGFLPALRRLCDQHGALLIFDEVMTGFRVAHGGAQSVYGVTPDLTCFGKIIGGGLPVGAYGGRRAMMEQVAPRGNVYQAGTLSGNPLAMAAGVATLNQIARPGFYEALDRQGAKLITGLRDAAAAAGVPVTTARVGGMLGLFFTEGPVHNFADAKRSDLERFSAYYRGMLAAGIYLAPSQFEAFFLSAAHDDAAIDKTLQAADTVFRGL

SEQ ID NO: 293 - protein, 437 aa, Unknown
  Environmental Sample
MHHHHHHGGSGTHEQSASLFSAAKQVIPGGVNSPVRAFKSVGCDPIFISRAEGSRIFDVDGNGYIDYVGSWGPMILGHCHPQVVAAIQQTAANGASFGAPTPLEIELAEMVCAAYPNIEKVRMVSSGTEATMSAIRLARGYTGRDKILKFDGCYHGHADSLLVKAGSGAATYGVPTSPGVPADLAQHTLTATYNDLAEVQALEAANPGQIACIIIEPIAGNMGCVAPRPGFLEGLRELCSAKGILLIIDEVMTGFRVAYGGAQERFGVRGDLVCLGKIIGGGLPVGAFGGKREIMDMLSPVGGVYQAGTLSGNPLAMSAGIATLKLLQQPGFYEEIEKKSAYLCAGLIEAAKEAPFATCLQRVGGMFCSFFTEGPVYSFADAQKSDTAAFGRFFRAMLEEGINLAPSQFEAGFMSIAHSQDDLDRTIEAARRSFRAL

SEQ ID NO: 294 - protein, 511 aa, Unknown
  Environmental Sample
MHHHHHHGGSGIAGSTDQGEHNEYRHGSLSRLGRRRPDLWRVCLQRPGAPAARREQGVVEHRRAAQAAPRRTAQAGRDLQAVQAVRAINPAGGDRGALPRAGRPREAGHRRARPGRRAAARRPGADLRGRRGLSRAEGQRALPAAPDAHHRTREQHRRPPRALQRVGQHQQRARRPVSRPHPGPPVRLRTASAPRVRVGREGRRRSARTLQHLMFGARAQIGFAGALALEAMAVFAGLRMESAMSVTAGLAGASSVGLIAWLMALRRRRSITDTPTSRIATAAQGFVELQGSGRLFGEQPLLSPLTGLPCLWYRFVVEERDRDNKWRTVQTGISDVSFILDDGSGEALVDPEGAEVITRHRERWQRDNQRYTEWKLIAGDDVYALGSFRTINGHSEALSASRDTGELLAEWKRDTPTLLKRFDLDGDGEIDMREWALARAEAQREVGQRHREIRARADTHLLGRPTDGRPYLLANIDPVRLANRYLWWAWVHVAVAITAISSIPWAWSRFS

SEQ ID NO: 295 - protein, 510 aa, Unknown
  Environmental Sample
MHHHHHHGGSGDSMYLAKIFRFMHPHRLVVVLGICILFASTANGQGNDPALSRHDWLGVCGRLLFDPDAWYNERFGASLDSDGEWLVIGNPNDDTACPFDPICTAGSAYIFRRENSGTYFLWQKIVPDDIRRLDSMGRFVAIRGSTAMVERGGEDIGGGIGAGEILIYALRDDQWELTDSVVSGDGRQSFGFGIFKWNGNYLAINTGYLDSAGRFGDEAIEIFRNIEGVWTYQDSVSDPLGRPRADWILDLAILPDGTLAVADHFDDTRSLNAGIVRVFEPVDGRWVLTQELLAPDGQPFYGIGLDADAGRIAVGHAAGLVDGPTGPVVGGRVDIYERGPDQWQRTHAIGLREPMSGDALGWNVELDGDRLLAIASDRPNPTASLPDGAWAIFDFDGSSWRQTLLASTPPWSLSSTSIAIELDGPTTFIGHSQWSPRIGLDRVGAVAVYDIACLSCQADLDHDGVLTIFDYLTFQTAFGTGDPLADFDGDGELTLFDFQAFQTAFGQGCP

SEQ ID NO: 296 - protein, 159 aa, Unknown
  Environmental Sample
MHHHHHHGGSGNENADDFPTIDFNRPLVPYREVFCGLALGCAEYVGMVKSARNTNTQLHIIKVSPEPGEHSPKAFLLVDVCGREIYTADRVIVNKPPEFVIHEFVVVVDKDQDGTISVRTTNTGRIADAVATVKLKVYETGEIDFLGSEVFAPKLDWGS

SEQ ID NO: 297 - protein, 246 aa, Unknown
  Environmental Sample
MHHHHHHGGSGTALTEGAKLFEKEIPYITELEGDVEGMKFIIKGEGTGDATTGTIKAKYICTTGDLPVPWATLVSTLSYGVQCFAKYPSHIKDFFKSAMPEGYTQERTISFEGDGVYKTRAMVTYERGSIYNRVTLTGENFKKDGHILRKNVAFQCPPSILYILPDTVNNGIRVEFNQAYDIEGVTEKLVTKCSQMNRPLAGSAAVHIPRYHHITYHTKLSKDRDERRDHMCLVEVVKAVDLDTYQ

SEQ ID NO: 298 - protein, 698 aa, Homo sapiens
MRLAVGALLVCAVLGLCLAVPDKTVRWCAVSEHEATKCQSFRDHMKSVIPSDGPSVACVKKASYLDCIRAIAANEADAVTLDAGLVYDAYLAPNNLKPVVAEFYGSKEDPQTFYYAVAVVKKDSGFQMNQLRGKKSCHTGLGRSAGWNIPIGLLYCDLPEPRKPLEKAVANFFSGSCAPCADGTDFPQLCQLCPGCGCSTLNQYFGYSGAFKCLKDGAGDVAFVKHSTIFENLANKADRDQYELLCLDNTRKPVDEYKDCHLAQVPSHTVVARSMGGKEDLIWELLNQAQEHFGKDKSKEFQLFSSPHGKDLLFKDSAHGFLKVPPRMDAKMYLGYEYVTAIRNLREGTCPEAPTDECKPVKWCALSHHERLKCDEWSVNSVGKIECVSAETTEDCIAKIMNGEADAMSLDGGFVYIAGKCGLVPVLAENYNKSDNCEDTPEAGYFAIAVVKKSASDLTWDNLKGKKSCHTAVGRTAGWNIPMGLLYNKINHCRFDEFFSEGCAPGSKKDSSLCKLCMGSGLNLCEPNNKEGYYGYTGAFRCLVEKGDVAFVKHQTVPQNTGGKNPDPWAKNLNEKDYELLCLDGTRKPVEEYANCHLARAPNHAVVTRKDKEACVHKILRQQQHLFGSNVTDCSGNFCLFRSETKDLLFRDDTVCLAKLHDRNTYEKYLGEEYVKAVGNLRKCSTSSLLEACTFRRP

SEQ ID NO: 299 - protein, 704 aa, Bos bovis
MRPAVRALLACAVLGLCLADPERTVRWCTISTHEANKCASFRENVLRILESGPFVSCVKKTSHMDCIKAISNNEADAVTLDGGLVYEAGLKPNNLKPVVAEFHGTKDNPQTHYYAVAVVKKDTDFKLNELRGKKSCHTGLGRSAGWNIPMAKLYKELPDPQESIQRAAANFFSASCVPCADQSSFPKLCQLCAGKGTDKCACSNHEPYFGYSGAFKCLMEGAGDVAFVKHSTVFDNLPNPEDRKNYELLCGDNTRKSVDDYQECYLAMVPSHAVVARTVGGKEDVIWELLNHAQEHFGKDKPDNFQLFQSPHGKDLLFKDSADGFLKIPSKMDFELYLGYEYVTALQNLRESKPPDSSKDECMVKWCAIGHQERTKCDRWSGFSGGAIECETAENTEECIAKIMKGEADAMSLDGGYLYIAGKCGLVPVLAENYKTEGESCKNTPEKGYLAVAVVKTSDANINWNNLKDKKSCHTAVDRTAGWNIPMGLLYSKINNCKFDEFFSAGCAPGSPRNSSLCALCIGSEKGTGKECVPNSNERYYGYTGAFRCLVEKGDVAFVKDQTVIQNTDGNNNEAWAKNLKKENFEVLCKDGTRKPVTDAENCHLARGPNHAVVSRKDKATCVEKILNKQQDDFGKSVTDCTSNFCLFQSNSKDLLFRDDTKCLASIAKKTYDSYLGDDYVRAMTNLRQCSTSKLLEACTFHKP

SEQ ID NO: 300 - protein, 13 aa, Unknown
  Environmental Sample
DPDKDGTLDAKEL

SEQ ID NO: 301 - protein, 13 aa, Unknown
  Environmental Sample
DPDKDGTIDLKEA

SEQ ID NO: 302 - protein, 13 aa, Unknown
  Environmental Sample
NPDNDGTIDAREL

SEQ ID NO: 303 - protein, 13 aa, Unknown
  Environmental Sample
DPDNDGTLDKKEY

SEQ ID NO: 304 - protein, 13 aa, Unknown
  Environmental Sample
DGNGDNMVSLQEF

SEQ ID NO: 305 - protein, 13 aa, Unknown
  Environmental Sample
DANRDRRLSDDEY

SEQ ID NO: 306 - protein, 13 aa, Unknown
  Environmental Sample
DTQGQGYLEKSDL

SEQ ID NO: 307 - protein, 13 aa, Unknown
  Environmental Sample
DTDGDGKVSFTEA

SEQ ID NO: 308 - protein, 13 aa, Unknown
  Environmental Sample
DADSDGKLTQTEL

SEQ ID NO: 309 - protein, 13 aa, Unknown
  Environmental Sample
DADGDGVVTREEF

SEQ ID NO: 310 - protein, 13 aa, Unknown
  Environmental Sample
DADGDGYISFEEL

SEQ ID NO: 311 - protein, 13 aa, Unknown
  Environmental Sample
DSDGDGRVSVAEF

SEQ ID NO: 312 - protein, 13 aa, Unknown
  Environmental Sample
DADSDGKLTQDEM

SEQ ID NO: 313 - protein, 13 aa, Unknown
  Environmental Sample
DANGDGRVTASEA

SEQ ID NO: 314 - protein, 13 aa, Unknown
  Environmental Sample
DTSSKGYLEQADF

SEQ ID NO: 315 - protein, 13 aa, Unknown
  Environmental Sample
DANGDGVITPDEA

SEQ ID NO: 316 - protein, 13 aa, Unknown
  Environmental Sample
DANGDGQITADEL

SEQ ID NO: 317 - protein, 13 aa, Unknown
  Environmental Sample
DANGDGVVTKEER

SEQ ID NO: 318 - protein, 13 aa, Unknown
  Environmental Sample
DTDKDGNISAEEA

SEQ ID NO: 319 - protein, 13 aa, Unknown
  Environmental Sample
DNNGDGIVNLGEA

SEQ ID NO: 320 - protein, 13 aa, Unknown
  Environmental Sample
DSNADGVLSIEEA

SEQ ID NO: 321 - protein, 13 aa, Unknown
  Environmental Sample
DKDSDGIISLEEF

SEQ ID NO: 322 - protein, 13 aa, Unknown
  Environmental Sample
DKDGNGFISKEEL

SEQ ID NO: 323 - protein, 13 aa, Unknown
  Environmental Sample
DKDGNGEIDYEEF

SEQ ID NO: 324 - protein, 13 aa, Unknown
  Environmental Sample
DTDANGVIDFGEF

SEQ ID NO: 325 - protein, 13 aa, Unknown
  Environmental Sample
DADGDGAISSEEH

SEQ ID NO: 326 - protein, 13 aa, Unknown
  Environmental Sample
DRNRDGKITRDEV

SEQ ID NO: 327 - protein, 13 aa, Unknown
  Environmental Sample
DRDGDGVLSRQER

SEQ ID NO: 328 - protein, 13 aa, Unknown
  Environmental Sample
DTNGDGVVDEDER

SEQ ID NO: 329 - protein, 13 aa, Unknown
  Environmental Sample
DSNGDGILDEAER

SEQ ID NO: 330 - protein, 13 aa, Unknown
  Environmental Sample
DQDGDGELNADEQ

SEQ ID NO: 331 - protein, 13 aa, Unknown
  Environmental Sample
DSNGDGRINTTDL

SEQ ID NO: 332 - protein, 13 aa, Unknown
  Environmental Sample
DVNNDGVVDALDV

SEQ ID NO: 333 - protein, 13 aa, Unknown
  Environmental Sample
DADDDGKLVLNEF

SEQ ID NO: 334 - protein, 13 aa, Unknown
  Environmental Sample
DTDGNAVLTVTEH

SEQ ID NO: 335 - protein, 13 aa, Unknown
  Environmental Sample
DANGDGIIDDDEC

SEQ ID NO: 336 - protein, 13 aa, Unknown
  Environmental Sample
DKDGDGALIAKEY

SEQ ID NO: 337 - protein, 13 aa, Unknown
  Environmental Sample
DQNADGKITLDEF

SEQ ID NO: 338 - protein, 13 aa, Unknown
  Environmental Sample
DQNRDGFISIEEH

SEQ ID NO: 339 - protein, 13 aa, Unknown
  Environmental Sample
DKDGDGALIAKEY

SEQ ID NO: 340 - protein, 13 aa, Unknown
  Environmental Sample
DADDDGKLVLNEF

SEQ ID NO: 341 - protein, 13 aa, Unknown
  Environmental Sample
DANGDGIIDDDEC

SEQ ID NO: 342 - protein, 13 aa, Unknown
  Environmental Sample
DQNRDGFISIEEH

SEQ ID NO: 343 - protein, 13 aa, Unknown
  Environmental Sample
DTDGNAVLTVTEH

SEQ ID NO: 344 - protein, 13 aa, Unknown
  Environmental Sample
DQNADGKITLDEF

SEQ ID NO: 345 - protein, 13 aa, Unknown
  Environmental Sample
DIDGDGQLTLFDF

SEQ ID NO: 346 - protein, 13 aa, Unknown
  Environmental Sample
DFDGDGSLTLFDF

SEQ ID NO: 347 - protein, 13 aa, Unknown
  Environmental Sample
DADGNGTIDFPEF

SEQ ID NO: 348 - protein, 13 aa, Unknown
  Environmental Sample
DKDGNGYISAAEL

SEQ ID NO: 349 - protein, 13 aa, Unknown
  Environmental Sample
DIDGDGQVNYEGK

SEQ ID NO: 350 - protein, 13 aa, Unknown
  Environmental Sample
DRNGDGKLSRDEL

SEQ ID NO: 351 - protein, 13 aa, Unknown
  Environmental Sample
DTDDDGLLTREEV

SEQ ID NO: 352 - protein, 13 aa, Unknown
  Environmental Sample
DFDGDGQLTLFDF

SEQ ID NO: 353 - protein, 13 aa, Unknown
  Environmental Sample
DLDGDGDIDLALT

SEQ ID NO: 354 - protein, 13 aa, Unknown
  Environmental Sample
DFDGNGIIDLAIV

SEQ ID NO: 355 - protein, 13 aa, Unknown
  Environmental Sample
DVNGDGHPDIITA

SEQ ID NO: 356 - protein, 13 aa, Unknown
  Environmental Sample
DLNGDGHADLVTA

SEQ ID NO: 357 - protein, 13 aa, Unknown
  Environmental Sample
DRDNDGRIRVKDI

SEQ ID NO: 358 - protein, 13 aa, Unknown
  Environmental Sample
DQEGVENLTYEEL

SEQ ID NO: 359 - protein, 13 aa, Unknown
  Environmental Sample
SKSNDEVITLEDL

SEQ ID NO: 360 - protein, 13 aa, Unknown
  Environmental Sample
KVDRNGFIDLEEL

SEQ ID NO: 361 - protein, 13 aa, Unknown
  Environmental Sample
DANADGVLDDAEL

SEQ ID NO: 362 - protein, 13 aa, Unknown
  Environmental Sample
DKNKDGKIDKQEA

SEQ ID NO: 363 - protein, 13 aa, Unknown
  Environmental Sample
DADQDGVVTVTEF

SEQ ID NO: 364 - protein, 13 aa, Unknown
  Environmental Sample
DINEDGVVDREEM

SEQ ID NO: 365 - protein, 13 aa, Unknown
  Environmental Sample
DKDKDRVIDPEEI

SEQ ID NO: 366 - protein, 13 aa, Unknown
  Environmental Sample
DTGKTRMLGQNEF

SEQ ID NO: 367 - protein, 13 aa, Unknown
  Environmental Sample
DTDHDGKVSREEF

SEQ ID NO: 368 - protein, 13 aa, Unknown
  Environmental Sample
DADASGALDNKEF

SEQ ID NO: 369 - protein, 13 aa, Unknown
  Environmental Sample
DTNKDGMVSKAEW

SEQ ID NO: 370 - protein, 13 aa, Unknown
  Environmental Sample
DTDKDGKILISDI

SEQ ID NO: 371 - protein, 13 aa, Unknown
  Environmental Sample
CPDRDGSLTVDQL

SEQ ID NO: 372 - protein, 13 aa, Unknown
  Environmental Sample
DSDQDGYHYRGGM

SEQ ID NO: 373 - protein, 13 aa, Unknown
  Environmental Sample
DANKDGRLTPEEM

SEQ ID NO: 374 - protein, 13 aa, Unknown
  Environmental Sample
DADGDGKLSLQEF

SEQ ID NO: 375 - protein, 13 aa, Unknown
  Environmental Sample
DLNSNGAVTRVEL

SEQ ID NO: 376 - protein, 13 aa, Unknown
  Environmental Sample
DSDGSGALSIAEA

SEQ ID NO: 377 - protein, 13 aa, Unknown
  Environmental Sample
DANNDGTVDFADL

SEQ ID NO: 378 - protein, 13 aa, Unknown
  Environmental Sample
DVNNDGVVDFADL

SEQ ID NO: 379 - protein, 13 aa, Unknown
  Environmental Sample
DVNGDGVVNFTDL

SEQ ID NO: 380 - protein, 13 aa, Unknown
  Environmental Sample
DLDGDGEIGFGDL

SEQ ID NO: 381 - protein, 13 aa, Unknown
  Environmental Sample
DIDGDGSLTLFDF

SEQ ID NO: 382 - protein, 13 aa, Unknown
  Environmental Sample
DFDGDGSLTLFDF

SEQ ID NO: 383 - protein, 13 aa, Unknown
  Environmental Sample
DQNQNGVVDLIDF

SEQ ID NO: 384 - protein, 13 aa, Unknown
  Environmental Sample
DLNGDKRVNLTDF

SEQ ID NO: 385 - protein, 13 aa, Unknown
  Environmental Sample
DLNKDGMLSTEEF

SEQ ID NO: 386 - protein, 13 aa, Unknown
  Environmental Sample
DQNQNGTVDLIDF

SEQ ID NO: 387 - protein, 13 aa, Unknown
  Environmental Sample
DLNKDGSVNLTDF

SEQ ID NO: 388 - protein, 13 aa, Unknown
  Environmental Sample
DENGDGELSREEL

SEQ ID NO: 389 - protein, 13 aa, Unknown
  Environmental Sample
DLNNDGVVNFADL

SEQ ID NO: 390 - protein, 13 aa, Unknown
  Environmental Sample
DTNGDSQVNFTDL

SEQ ID NO: 391 - protein, 13 aa, Unknown
  Environmental Sample
DVNGDTNVNLQDL

SEQ ID NO: 392 - protein, 13 aa, Unknown
  Environmental Sample
DKNKDGKISGADF

SEQ ID NO: 393 - protein, 13 aa, Unknown
  Environmental Sample
DADKDGVITLEEF

SEQ ID NO: 394 - protein, 13 aa, Unknown
  Environmental Sample
DKNGDGAIDRAEF

SEQ ID NO: 395 - protein, 13 aa, Unknown
  Environmental Sample
DADGDGRIGKEEF

SEQ ID NO: 396 - protein, 13 aa, Unknown
  Environmental Sample
DVDGDGQIGLEDM

SEQ ID NO: 397 - protein, 13 aa, Unknown
  Environmental Sample
DKNGDGFIDAKDL

SEQ ID NO: 398 - protein, 13 aa, Unknown
  Environmental Sample
DADGDGKVTKDEF

SEQ ID NO: 399 - protein, 13 aa, Unknown
  Environmental Sample
DIDGDGKITDADL

SEQ ID NO: 400 - protein, 13 aa, Unknown
  Environmental Sample
DSDHDGKVSRDEF

SEQ ID NO: 401 - protein, 13 aa, Unknown
  Environmental Sample
DADHDGFISEAEA

SEQ ID NO: 402 - protein, 13 aa, Unknown
  Environmental Sample
DKNADGKVCLDEF

SEQ ID NO: 403 - protein, 13 aa, Unknown
  Environmental Sample
DKDADGFLTLEEF

SEQ ID NO: 404 - protein, 13 aa, Unknown
  Environmental Sample
DTNGDNVVNFTDL

SEQ ID NO: 405 - protein, 13 aa, Unknown
  Environmental Sample
DIDGSGTVDFTDL

SEQ ID NO: 406 - protein, 13 aa, Unknown
  Environmental Sample
DTNNNGELSEAEL

SEQ ID NO: 407 - protein, 13 aa, Unknown
  Environmental Sample
DSNGDGEIDASDR

SEQ ID NO: 408 - protein, 13 aa, Unknown
  Environmental Sample
DLNQNGRVDGGRE

SEQ ID NO: 409 - protein, 13 aa, Unknown
  Environmental Sample
DLDGNEQVDFYDL

SEQ ID NO: 410 - protein, 13 aa, Unknown
  Environmental Sample
DIDGDGLVGFTDL

SEQ ID NO: 411 - protein, 13 aa, Unknown
  Environmental Sample
DLDGDGVLTLFDF

SEQ ID NO: 412 - protein, 13 aa, Unknown
  Environmental Sample
DFDGDGALTLFDF

SEQ ID NO: 413 - protein, 13 aa, Unknown
  Environmental Sample
DVNKDGVVDAADA

SEQ ID NO: 414 - protein, 13 aa, Unknown
  Environmental Sample
DINKDGKVDLEDA

SEQ ID NO: 415 - protein, 13 aa, Unknown
  Environmental Sample
DSNGDGQIDSNAL

SEQ ID NO: 416 - protein, 13 aa, Unknown
  Environmental Sample
DKDNDGRVTRDEW

SEQ ID NO: 417 - protein, 13 aa, Unknown
  Environmental Sample
DKNNDGAWTLDEI

SEQ ID NO: 418 - protein, 13 aa, Unknown
  Environmental Sample
DLDYSGTVNFEDL

SEQ ID NO: 419 - protein, 13 aa, Unknown
  Environmental Sample
DINKDGFVNFTDM

SEQ ID NO: 420 - protein, 13 aa, Unknown
  Environmental Sample
DGNQDGVISKADV

SEQ ID NO: 421 - protein, 13 aa, Unknown
  Environmental Sample
DANADGVLNASEA

SEQ ID NO: 422 - protein, 13 aa, Unknown
  Environmental Sample
DHNGDGKVSWNEY

SEQ ID NO: 423 - protein, 13 aa, Unknown
  Environmental Sample
DTSGDGNLDRAEL

SEQ ID NO: 424 - protein, 13 aa, Unknown
  Environmental Sample
DTDGNGMLSREEL

SEQ ID NO: 425 - protein, 13 aa, Unknown
  Environmental Sample
DRNRDLKITRREM

SEQ ID NO: 426 - protein, 13 aa, Unknown
  Environmental Sample
DLNRDQELTQAEF

SEQ ID NO: 427 - protein, 13 aa, Unknown
  Environmental Sample
DKDGNNLLTFEEW

SEQ ID NO: 428 - protein, 13 aa, Unknown
  Environmental Sample
DLDGDGTIDLKEW

SEQ ID NO: 429 - protein, 13 aa, Unknown
  Environmental Sample
DSNGDGILDEAER

SEQ ID NO: 430 - protein, 13 aa, Unknown
  Environmental Sample
DVNNDGVVDALDV

SEQ ID NO: 431 - protein, 13 aa, Unknown
  Environmental Sample
DSNGDGRINTTDL

SEQ ID NO: 432 - protein, 13 aa, Unknown
  Environmental Sample
DTNGDGVVDEDER

SEQ ID NO: 433 - protein, 13 aa, Unknown
  Environmental Sample
DRDGDGVLSRQER

SEQ ID NO: 434 - protein, 13 aa, Unknown
  Environmental Sample
DQDGDGELNADEQ

SEQ ID NO: 435 - protein, 13 aa, Unknown
  Environmental Sample
DRNDDGAIDLEDA

SEQ ID NO: 436 - protein, 13 aa, Unknown
  Environmental Sample
DVDGDGQVTIDEF

SEQ ID NO: 437 - protein, 13 aa, Unknown
  Environmental Sample
DADGDGQLSLAEY

SEQ ID NO: 438 - protein, 13 aa, Unknown
  Environmental Sample
DADGDGKVTQAEV

SEQ ID NO: 439 - protein, 13 aa, Unknown
  Environmental Sample
DRSRDGKLDREEF

SEQ ID NO: 440 - protein, 13 aa, Unknown
  Environmental Sample
DRNKDGFVDKSES

SEQ ID NO: 441 - protein, 13 aa, Unknown
  Environmental Sample
DSDGDGHISQAEW

SEQ ID NO: 442 - protein, 13 aa, Unknown
  Environmental Sample
DTNGDGAITNADG

SEQ ID NO: 443 - protein, 13 aa, Unknown
  Environmental Sample
DYNRDGVVDGNER

SEQ ID NO: 444 - protein, 13 aa, Unknown
  Environmental Sample
DSDNDGTLDRRLD

SEQ ID NO: 445 - protein, 13 aa, Unknown
  Environmental Sample
DTNGDGVVNFSDL

SEQ ID NO: 446 - protein, 13 aa, Unknown
  Environmental Sample
DLNRDGRLDPVEL

SEQ ID NO: 447 - protein, 13 aa, Unknown
  Environmental Sample
DTNGDGVADVDEL

SEQ ID NO: 448 - protein, 13 aa, Unknown
  Environmental Sample
DADGDERLTPREF

SEQ ID NO: 449 - protein, 13 aa, Unknown
  Environmental Sample
DRNRDGIITRNEM

SEQ ID NO: 450 - protein, 13 aa, Unknown
  Environmental Sample
DVDGNNLLTFEEW

SEQ ID NO: 451 - protein, 13 aa, Unknown
  Environmental Sample
DINHSGTVNFNDF

SEQ ID NO: 452 - protein, 13 aa, Unknown
  Environmental Sample
DLNGDGVVNIADL

SEQ ID NO: 453 - protein, 13 aa, Unknown
  Environmental Sample
DRDADGILSDEEL

SEQ ID NO: 454 - protein, 13 aa, Unknown
  Environmental Sample
DHDGRGSLTAAQL

SEQ ID NO: 455 - protein, 13 aa, Unknown
  Environmental Sample
DRDRDGEISLEEW

SEQ ID NO: 456 - protein, 13 aa, Unknown
  Environmental Sample
DTNGDGVVNFVDL

SEQ ID NO: 457 - protein, 13 aa, Unknown
  Environmental Sample
DVDADGDVDFADL

SEQ ID NO: 458 - protein, 13 aa, Unknown
  Environmental Sample
DFNNDGRNETTSW

SEQ ID NO: 459 - protein, 13 aa, Unknown
  Environmental Sample
DRNGNGTIDAGRE

SEQ ID NO: 460 - protein, 13 aa, Unknown
  Environmental Sample
GGNGDGRINRRDA

SEQ ID NO: 461 - protein, 13 aa, Unknown
  Environmental Sample
DENGDGELSREEL

SEQ ID NO: 462 - protein, 13 aa, Unknown
  Environmental Sample
DADRDGLLSLEEF

SEQ ID NO: 463 - protein, 13 aa, Unknown
  Environmental Sample
DANGDGWVNRDEL

SEQ ID NO: 464 - protein, 13 aa, Unknown
  Environmental Sample
DLDGDGLLDLVLG

SEQ ID NO: 465 - protein, 13 aa, Unknown
  Environmental Sample
DLDGDGDTDLLLA

SEQ ID NO: 466 - protein, 13 aa, Unknown
  Environmental Sample
DIDGDGRLDLVMG

SEQ ID NO: 467 - protein, 13 aa, Unknown
  Environmental Sample
DIDGDGDLDLFWG

SEQ ID NO: 468 - protein, 13 aa, Unknown
  Environmental Sample
DIDCNGRLDLFIG

SEQ ID NO: 469 - protein, 13 aa, Unknown
  Environmental Sample
DLNGDGRIDLLAE

SEQ ID NO: 470 - protein, 13 aa, Unknown
  Environmental Sample
DLDNSGRVDLFVQ

SEQ ID NO: 471 - protein, 13 aa, Unknown
  Environmental Sample
DKDADGKLSPEER

SEQ ID NO: 472 - protein, 13 aa, Unknown
  Environmental Sample
DADGNGELSPEER

SEQ ID NO: 473 - protein, 13 aa, Unknown
  Environmental Sample
DANKDGKLDPEER

SEQ ID NO: 474 - protein, 13 aa, Unknown
  Environmental Sample
DLDGNGEIDIREW

SEQ ID NO: 475 - protein, 13 aa, Unknown
  Environmental Sample
DLNGDGTISVSEA

SEQ ID NO: 476 - protein, 13 aa, Unknown
  Environmental Sample
DKNKDGMISKEEY

SEQ ID NO: 477 - protein, 13 aa, Unknown
  Environmental Sample
DLNGDGKLDKTEF

SEQ ID NO: 478 - protein, 13 aa, Unknown
  Environmental Sample
DCDGDGELTLFDF

SEQ ID NO: 479 - protein, 13 aa, Unknown
  Environmental Sample
DFDGDGELTLFDF

SEQ ID NO: 480 - protein, 13 aa, Unknown
  Environmental Sample
DTDKSGDVSLEEF

SEQ ID NO: 481 - protein, 13 aa, Unknown
  Environmental Sample
DANNDGKLTKDEI

SEQ ID NO: 482 - protein, 13 aa, Unknown
  Environmental Sample
GGNGDGKISQQDA

SEQ ID NO: 483 - protein, 13 aa, Unknown
  Environmental Sample
DRNNNGAIDSGRE

SEQ ID NO: 484 - protein, 13 aa, Unknown
  Environmental Sample
DFDGDGSLTLFDF

SEQ ID NO: 485 - protein, 13 aa, Unknown
  Environmental Sample
DIDGDGSLTLFDF

SEQ ID NO: 486 - protein, 12 aa, Unknown
  Environmental Sample
DANKDGDIERSD

SEQ ID NO: 487 - protein, 13 aa, Unknown
  Environmental Sample
DRNEDGRVDRKER

SEQ ID NO: 488 - protein, 13 aa, Unknown
  Environmental Sample
DSDGDGKVSRREF

SEQ ID NO: 489 - protein, 13 aa, Unknown
  Environmental Sample
DLNNDRFLDADEI

SEQ ID NO: 490 - protein, 13 aa, Unknown
  Environmental Sample
DINHDGILTEEEF

SEQ ID NO: 491 - protein, 13 aa, Unknown
  Environmental Sample
DPEGTGSLSESQF

SEQ ID NO: 492 - protein, 13 aa, Unknown
  Environmental Sample
DADGDGSVTQAEY

SEQ ID NO: 493 - protein, 13 aa, Unknown
  Environmental Sample
DTNGDGVVSADEV

SEQ ID NO: 494 - protein, 13 aa, Unknown
  Environmental Sample
DTDDDGLLTREEV

SEQ ID NO: 495 - protein, 13 aa, Unknown
  Environmental Sample
DRNGDGKLSRDEL

SEQ ID NO: 496 - protein, 13 aa, Unknown
  Environmental Sample
DANGDGVVTEVEI

SEQ ID NO: 497 - protein, 13 aa, Unknown
  Environmental Sample
DKDGDGRVSAREF

SEQ ID NO: 498 - protein, 13 aa, Unknown
  Environmental Sample
DGNGDGAVTRAEY

SEQ ID NO: 499 - protein, 13 aa, Unknown
  Environmental Sample
DRDGDGYVTQAEI

SEQ ID NO: 500 - protein, 13 aa, Unknown
  Environmental Sample
DADGDGALSMQEF

SEQ ID NO: 501 - protein, 13 aa, Unknown
  Environmental Sample
DGDDDGSLTMEEM

SEQ ID NO: 502 - protein, 13 aa, Unknown
  Environmental Sample
DTNGDGVVNFTDL

SEQ ID NO: 503 - protein, 13 aa, Unknown
  Environmental Sample
DVNDDGVVDFSDL

SEQ ID NO: 504 - protein, 13 aa, Unknown
  Environmental Sample
DLNGSGKLSFDEL

SEQ ID NO: 505 - protein, 13 aa, Unknown
  Environmental Sample
DVDGDGEVTLMDV

SEQ ID NO: 506 - protein, 13 aa, Unknown
  Environmental Sample
DLNQDGVVDASDV

SEQ ID NO: 507 - protein, 13 aa, Unknown
  Environmental Sample
DADRDGTVNDEEI

SEQ ID NO: 508 - protein, 13 aa, Unknown
  Environmental Sample
DFDGDGSLTIFDF

SEQ ID NO: 509 - protein, 13 aa, Unknown
  Environmental Sample
DIDGDGQLTIFDF

SEQ ID NO: 510 - protein, 13 aa, Unknown
  Environmental Sample
DRDGDGKLSTAEA

SEQ ID NO: 511 - protein, 13 aa, Unknown
  Environmental Sample
DKDGDGALSRTEF

SEQ ID NO: 512 - protein, 13 aa, Unknown
  Environmental Sample
DSNGDRTLVLEEF

SEQ ID NO: 513 - protein, 13 aa, Unknown
  Environmental Sample
DTDGSQSLSEEEA

SEQ ID NO: 514 - protein, 13 aa, Unknown
  Environmental Sample
DLNADGRLDQVSM

SEQ ID NO: 515 - protein, 13 aa, Unknown
  Environmental Sample
DDNGDGRIDASDA

SEQ ID NO: 516 - protein, 13 aa, Unknown
  Environmental Sample
DRNGNGRIDDGKE

SEQ ID NO: 517 - protein, 13 aa, Unknown
  Environmental Sample
DIDGDGQLTLFDF

SEQ ID NO: 518 - protein, 13 aa, Unknown
  Environmental Sample
DFDGDGQLTLFDF

SEQ ID NO: 519 - protein, 13 aa, Unknown
  Environmental Sample
DLNGDGKLDVVVA

SEQ ID NO: 520 - protein, 13 aa, Unknown
  Environmental Sample
DLNRDGKADIVAT

SEQ ID NO: 521 - protein, 13 aa, Unknown
  Environmental Sample
DLNNDGAIDLVTS

SEQ ID NO: 522 - protein, 13 aa, Unknown
  Environmental Sample
DLNGDGVVNFTDL

SEQ ID NO: 523 - protein, 13 aa, Unknown
  Environmental Sample
DTNGDGVVNFTDL

SEQ ID NO: 524 - protein, 13 aa, Unknown
  Environmental Sample
DVNNDGKVDAADV

SEQ ID NO: 525 - protein, 13 aa, Unknown
  Environmental Sample
DVNKDGKIDAADV

SEQ ID NO: 526 - protein, 13 aa, Unknown
  Environmental Sample
DLDGDGKEEVIFA

SEQ ID NO: 527 - protein, 13 aa, Unknown
  Environmental Sample
DLNKNGKPEIYVS

SEQ ID NO: 528 - protein, 13 aa, Unknown
  Environmental Sample
DLDNDGSREIIAI

SEQ ID NO: 529 - protein, 13 aa, Unknown
  Environmental Sample
DVNGDGQQDIIIN

SEQ ID NO: 530 - protein, 13 aa, Unknown
  Environmental Sample
GLLADGELSVDEV

SEQ ID NO: 531 - protein, 13 aa, Unknown
  Environmental Sample
DADRDGTLTVEEV

SEQ ID NO: 532 - protein, 13 aa, Unknown
  Environmental Sample
DVNRDGVLNFADI

SEQ ID NO: 533 - protein, 13 aa, Unknown
  Environmental Sample
DVNADGVVNAEDL

SEQ ID NO: 534 - protein, 13 aa, Unknown
  Environmental Sample
DINKDGFVNFTDM

SEQ ID NO: 535 - protein, 13 aa, Unknown
  Environmental Sample
DLDYSGTVNFEDL

SEQ ID NO: 536 - protein, 13 aa, Unknown
  Environmental Sample
PFNGDGYIDPEDV

SEQ ID NO: 537 - protein, 13 aa, Unknown
  Environmental Sample
DKNGDNYIPFFNS

SEQ ID NO: 538 - protein, 13 aa, Unknown
  Environmental Sample
DADGDAKLTPAEF

SEQ ID NO: 539 - protein, 13 aa, Unknown
  Environmental Sample
DTNGDNLLSFEEW

SEQ ID NO: 540 - protein, 13 aa, Unknown
  Environmental Sample
DRNRDGVITRIEM

SEQ ID NO: 541 - protein, 13 aa, Unknown
  Environmental Sample
DDDRDGVLSGKEL

SEQ ID NO: 542 - protein, 13 aa, Unknown
  Environmental Sample
DLNGNGLCERGEV

SEQ ID NO: 543 - protein, 13 aa, Unknown
  Environmental Sample
DTNGDGKVTLADW

SEQ ID NO: 544 - protein, 13 aa, Unknown
  Environmental Sample
DVNGDGKITNDID

SEQ ID NO: 545 - protein, 13 aa, Unknown
  Environmental Sample
DINGDGVLNFFDV

SEQ ID NO: 546 - protein, 13 aa, Unknown
  Environmental Sample
DFNGDGAFDFFDI

SEQ ID NO: 547 - protein, 13 aa, Unknown
  Environmental Sample
DRDQDGSVSKTEF

SEQ ID NO: 548 - protein, 13 aa, Unknown
  Environmental Sample
DQDKDGQISKGEA

SEQ ID NO: 549 - protein, 13 aa, Unknown
  Environmental Sample
DTDRNGKISLIEW

SEQ ID NO: 550 - protein, 13 aa, Unknown
  Environmental Sample
DFDGDGALTLFDF

SEQ ID NO: 551 - protein, 13 aa, Unknown
  Environmental Sample
DVDGNGYIDYVGS

SEQ ID NO: 552 - protein, 13 aa, Unknown
  Environmental Sample
DQNGDGKVDKTEY

SEQ ID NO: 553 - protein, 13 aa, Unknown
  Environmental Sample
DLDKNGELSSDEY

SEQ ID NO: 554 - protein, 13 aa, Unknown
  Environmental Sample
DTNKDGVISKADP

SEQ ID NO: 555 - protein, 13 aa, Unknown
  Environmental Sample
DKNKSKTIGHDEY

SEQ ID NO: 556 - protein, 13 aa, Unknown
  Environmental Sample
DENKDGQVSVDEY

SEQ ID NO: 557 - protein, 13 aa, Unknown
  Environmental Sample
DTDNSQQISSAEF

SEQ ID NO: 558 - protein, 13 aa, Unknown
  Environmental Sample
DTDLNQQVTMAEA

SEQ ID NO: 559 - protein, 13 aa, Unknown
  Environmental Sample
DLDKDGTVSEAEF

SEQ ID NO: 560 - protein, 13 aa, Unknown
  Environmental Sample
DKNGDQLLTRDEL

SEQ ID NO: 561 - protein, 13 aa, Unknown
  Environmental Sample
DRNGDGVVSKAEV

SEQ ID NO: 562 - protein, 13 aa, Unknown
  Environmental Sample
DLDHDGVLTIFDY

SEQ ID NO: 563 - protein, 13 aa, Unknown
  Environmental Sample
DFDGDGELTLFDF

SEQ ID NO: 564 - protein, 13 aa, Unknown
  Environmental Sample
DADGDGELSAMEI

SEQ ID NO: 565 - protein, 13 aa, Unknown
  Environmental Sample
DTNGDGKLSVDEL

SEQ ID NO: 566 - protein, 13 aa, Unknown
  Environmental Sample
DTNNDGFLSGDEI

SEQ ID NO: 567 - protein, 13 aa, Unknown
  Environmental Sample
DKDGDGKISKEEL

SEQ ID NO: 568 - protein, 13 aa, Unknown
  Environmental Sample
DTNRDGELNGEEA

SEQ ID NO: 569 - protein, 13 aa, Unknown
  Environmental Sample
DGNGDGVFDEAEM

SEQ ID NO: 570 - protein, 13 aa, Unknown
  Environmental Sample
DKDGDFRLSADEQ

SEQ ID NO: 571 - protein, 13 aa, Unknown
  Environmental Sample
DLNGDGVVDDEEA

SEQ ID NO: 572 - protein, 13 aa, Unknown
  Environmental Sample
DANGDGIVDEQEA

SEQ ID NO: 573 - protein, 13 aa, Unknown
  Environmental Sample
DANGDGNLDDEEQ

SEQ ID NO: 574 - protein, 13 aa, Unknown
  Environmental Sample
DKDGDGTLTRDEF

SEQ ID NO: 575 - protein, 13 aa, Unknown
  Environmental Sample
DADKNGVLSRDEF

SEQ ID NO: 576 - protein, 13 aa, Unknown
  Environmental Sample
DLDGDGMLSLSEF

SEQ ID NO: 577 - protein, 13 aa, Unknown
  Environmental Sample
DTNQDGQISGDEL

SEQ ID NO: 578 - protein, 13 aa, Unknown
  Environmental Sample
DTDASGALDTAEV

SEQ ID NO: 579 - protein, 13 aa, Unknown
  Environmental Sample
DMDTDCSVSQSEF

SEQ ID NO: 580 - protein, 13 aa, Unknown
  Environmental Sample
DTDRDGQLTQDEF

SEQ ID NO: 581 - protein, 13 aa, Unknown
  Environmental Sample
DQNHDGVLSHEEF

SEQ ID NO: 582 - protein, 13 aa, Unknown
  Environmental Sample
DADHDGKVTLKEL

SEQ ID NO: 583 - protein, 13 aa, Unknown
  Environmental Sample
DISGDGTVQMLYP

SEQ ID NO: 584 - protein, 13 aa, Unknown
  Environmental Sample
IRANNQVISFAEY

SEQ ID NO: 585 - protein, 13 aa, Unknown
  Environmental Sample
DADNSGTVDPDEI

SEQ ID NO: 586 - protein, 13 aa, Unknown
  Environmental Sample
DANGDGKLSLEEL

SEQ ID NO: 587 - protein, 13 aa, Unknown
  Environmental Sample
DADKDGKLSAAEM

SEQ ID NO: 588 - protein, 13 aa, Unknown
  Environmental Sample
DADGDGALSMEEM

SEQ ID NO: 589 - protein, 13 aa, Unknown
  Environmental Sample
DADGDGMLSAEEF

SEQ ID NO: 590 - protein, 13 aa, Unknown
  Environmental Sample
DRNRDGYVTGTEL

SEQ ID NO: 591 - protein, 13 aa, Unknown
  Environmental Sample
DTNNDGRLTREEY

SEQ ID NO: 592 - protein, 13 aa, Unknown
  Environmental Sample
DANRDGFATPEEV

SEQ ID NO: 593 - protein, 13 aa, Unknown
  Environmental Sample
DLDGDGSLTLFDF

SEQ ID NO: 594 - protein, 13 aa, Unknown
  Environmental Sample
DFDGDGTLTLFDF

SEQ ID NO: 595 - protein, 13 aa, Unknown
  Environmental Sample
DSDASGTLTREEL

SEQ ID NO: 596 - protein, 13 aa, Unknown
  Environmental Sample
DTNGDGVIDAGEA

SEQ ID NO: 597 - protein, 13 aa, Unknown
  Environmental Sample
DTDGDGAISLAEA

SEQ ID NO: 598 - protein, 13 aa, Unknown
  Environmental Sample
DADGDGLVTRAEM

SEQ ID NO: 599 - protein, 13 aa, Unknown
  Environmental Sample
DRNGDGVLSPADF

SEQ ID NO: 600 - protein, 13 aa, Unknown
  Environmental Sample
DADDNGAYSAEEL

SEQ ID NO: 601 - protein, 13 aa, Unknown
  Environmental Sample
DLDGDGAVTLAEA

SEQ ID NO: 602 - protein, 13 aa, Unknown
  Environmental Sample
DANHDGTVTRTEF

SEQ ID NO: 603 - protein, 13 aa, Unknown
  Environmental Sample
DKNGDNYIPFFNS

SEQ ID NO: 604 - protein, 13 aa, Unknown
  Environmental Sample
DIDGDGHLTLFDF

SEQ ID NO: 605 - protein, 13 aa, Unknown
  Environmental Sample
DLDGDATLTLYDM

SEQ ID NO: 606 - protein, 13 aa, Unknown
  Environmental Sample
DINGDGLLNFFDI

SEQ ID NO: 607 - protein, 13 aa, Unknown
  Environmental Sample
DFNNDGLFNFFDF

SEQ ID NO: 608 - protein, 13 aa, Unknown
  Environmental Sample
DRNGNGTIDNGAE

SEQ ID NO: 609 - protein, 13 aa, Unknown
  Environmental Sample
DANSDNALSKSEF

SEQ ID NO: 610 - protein, 13 aa, Unknown
  Environmental Sample
DANKDGAVTPAEL

SEQ ID NO: 611 - protein, 13 aa, Unknown
  Environmental Sample
DSDGDGAVSKAEA

SEQ ID NO: 612 - protein, 13 aa, Unknown
  Environmental Sample
DVNKDGQINAADR

SEQ ID NO: 613 - protein, 13 aa, Unknown
  Environmental Sample
DTDKNGSISEAEF

SEQ ID NO: 614 - protein, 13 aa, Unknown
  Environmental Sample
DANGDKTITNAEM

SEQ ID NO: 615 - protein, 13 aa, Unknown
  Environmental Sample
DSNKDGKISAEEH

SEQ ID NO: 616 - protein, 13 aa, Unknown
  Environmental Sample
DINGDGLMDFVTG

SEQ ID NO: 617 - protein, 13 aa, Unknown
  Environmental Sample
DGDGDNDVLSSSA

SEQ ID NO: 618 - protein, 13 aa, Unknown
  Environmental Sample
DVNGDGLLDIVTS

SEQ ID NO: 619 - protein, 13 aa, Unknown
  Environmental Sample
DYDDNGVVSLAEL

SEQ ID NO: 620 - protein, 13 aa, Unknown
  Environmental Sample
DVSGDGNLSTAEI

SEQ ID NO: 621 - protein, 13 aa, Unknown
  Environmental Sample
DLDGDGIELTGYA

SEQ ID NO: 622 - protein, 13 aa, Unknown
  Environmental Sample
DSNGDGRIDRLDK

SEQ ID NO: 623 - protein, 13 aa, Unknown
  Environmental Sample
DRNGNGIIDSGKE

SEQ ID NO: 624 - protein, 13 aa, Unknown
  Environmental Sample
DADKSGGIDHNEW

SEQ ID NO: 625 - protein, 13 aa, Unknown
  Environmental Sample
DTNGDAQVVKEEF

SEQ ID NO: 626 - protein, 13 aa, Unknown
  Environmental Sample
DQNGDGELSAGEL

SEQ ID NO: 627 - protein, 13 aa, Unknown
  Environmental Sample
DQDGSNSVSESEY

SEQ ID NO: 628 - protein, 13 aa, Unknown
  Environmental Sample
DSDASGSLSETEY

SEQ ID NO: 629 - protein, 13 aa, Unknown
  Environmental Sample
DSDASGDLSEEEF

SEQ ID NO: 630 - protein, 13 aa, Unknown
  Environmental Sample
DSDGDGAVSEAEF

SEQ ID NO: 631 - protein, 13 aa, Unknown
  Environmental Sample
DTDGSGDLSEDEL

SEQ ID NO: 632 - protein, 13 aa, Unknown
  Environmental Sample
DANRDGRLDAQDA

SEQ ID NO: 633 - protein, 13 aa, Unknown
  Environmental Sample
DLNGDGRQTLTSM

SEQ ID NO: 634 - protein, 13 aa, Unknown
  Environmental Sample
DRNGNGRIDDGRE

SEQ ID NO: 635 - protein, 13 aa, Unknown
  Environmental Sample
DADQDGKLAAEEM

SEQ ID NO: 636 - protein, 13 aa, Unknown
  Environmental Sample
DDNADGAISKEEM

SEQ ID NO: 637 - protein, 13 aa, Unknown
  Environmental Sample
DADQNGQITKEEL

SEQ ID NO: 638 - protein, 13 aa, Unknown
  Environmental Sample
DADQDGFISPAEL

SEQ ID NO: 639 - protein, 13 aa, Unknown
  Environmental Sample
DQDRSGKVDMQEW

SEQ ID NO: 640 - protein, 13 aa, Unknown
  Environmental Sample
DVNNDGVIDLRDF

SEQ ID NO: 641 - protein, 13 aa, Unknown
  Environmental Sample
DRDGDGRLDRWQG

SEQ ID NO: 642 - protein, 13 aa, Unknown
  Environmental Sample
DPDRSGAFGITDV

SEQ ID NO: 643 - protein, 13 aa, Unknown
  Environmental Sample
DANTDSQLSLDEY

SEQ ID NO: 644 - protein, 13 aa, Unknown
  Environmental Sample
DSNGDGMVSLEEF

SEQ ID NO: 645 - protein, 13 aa, Unknown
  Environmental Sample
DANGDGVINFADL

SEQ ID NO: 646 - protein, 13 aa, Unknown
  Environmental Sample
DANGDGSLDASEF

SEQ ID NO: 647 - protein, 13 aa, Unknown
  Environmental Sample
DKNGDGKVSQEEM

SEQ ID NO: 648 - protein, 13 aa, Unknown
  Environmental Sample
DIDGNGLVDFSDL

SEQ ID NO: 649 - protein, 13 aa, Unknown
  Environmental Sample
DLDGNEQVDFYDL

SEQ ID NO: 650 - protein, 13 aa, Unknown
  Environmental Sample
DANRDGEISLNEW

SEQ ID NO: 651 - protein, 13 aa, Unknown
  Environmental Sample
DADRDGVVTPADI

SEQ ID NO: 652 - protein, 13 aa, Unknown
  Environmental Sample
DTDRNRRLDFFDI

SEQ ID NO: 653 - protein, 13 aa, Unknown
  Environmental Sample
DFNNDGRVDMFAV

SEQ ID NO: 654 - protein, 13 aa, Unknown
  Environmental Sample
DLDGDGRLDWFMT

SEQ ID NO: 655 - protein, 13 aa, Unknown
  Environmental Sample
DFDGDGYLDIYCV

SEQ ID NO: 656 - protein, 13 aa, Unknown
  Environmental Sample
DGNRDGKVSREEL

SEQ ID NO: 657 - protein, 13 aa, Unknown
  Environmental Sample
DADKDGTLTRDEM

SEQ ID NO: 658 - protein, 13 aa, Unknown
  Environmental Sample
DTDKSGDVSLEEF

SEQ ID NO: 659 - protein, 13 aa, Unknown
  Environmental Sample
DANNDGKLTKDEI

SEQ ID NO: 660 - protein, 13 aa, Unknown
  Environmental Sample
DVNCDGKVNLVDF

SEQ ID NO: 661 - protein, 13 aa, Unknown
  Environmental Sample
RLNNDGKVDLVDF

SEQ ID NO: 662 - protein, 13 aa, Unknown
  Environmental Sample
DANKDGTVTPEER

SEQ ID NO: 663 - protein, 13 aa, Unknown
  Environmental Sample
DTNKDGAVSRAEF

SEQ ID NO: 664 - protein, 13 aa, Unknown
  Environmental Sample
DVNKDGKLDQVDR

SEQ ID NO: 665 - protein, 13 aa, Unknown
  Environmental Sample
DTDGNGAISRDEF

SEQ ID NO: 666 - protein, 13 aa, Unknown
  Environmental Sample
DQDRDGNLTPEEI

SEQ ID NO: 667 - protein, 13 aa, Unknown
  Environmental Sample
DRNGDGQVSEEEF

SEQ ID NO: 668 - protein, 13 aa, Unknown
  Environmental Sample
DSNGDGFISPEEF

SEQ ID NO: 669 - protein, 13 aa, Unknown
  Environmental Sample
DTNGDKSISKDEH

SEQ ID NO: 670 - protein, 13 aa, Unknown
  Environmental Sample
DKNGDGVISHEEF

SEQ ID NO: 671 - protein, 13 aa, Unknown
  Environmental Sample
DVDGNGYIDFCGS

SEQ ID NO: 672 - protein, 13 aa, Unknown
  Environmental Sample
DTDGDGKIDIDDL

SEQ ID NO: 673 - protein, 13 aa, Unknown
  Environmental Sample
DSNGDGKLTRDEL

SEQ ID NO: 674 - protein, 13 aa, Unknown
  Environmental Sample
DTNQDGAITVEEP

SEQ ID NO: 675 - protein, 13 aa, Unknown
  Environmental Sample
DVDADGRLELTLE

SEQ ID NO: 676 - protein, 13 aa, Unknown
  Environmental Sample
DDDDNNQVSYGEL

SEQ ID NO: 677 - protein, 13 aa, Unknown
  Environmental Sample
DKDGNGYISPQEY

SEQ ID NO: 678 - protein, 13 aa, Unknown
  Environmental Sample
DVNNDGVVNFNDL

SEQ ID NO: 679 - protein, 13 aa, Unknown
  Environmental Sample
DTNGDNVVNFTDL

SEQ ID NO: 680 - protein, 13 aa, Unknown
  Environmental Sample
DKNRDGAIAKDEL

SEQ ID NO: 681 - protein, 13 aa, Unknown
  Environmental Sample
DTNKDGSISREEF

SEQ ID NO: 682 - protein, 13 aa, Unknown
  Environmental Sample
DANKDGRVTAEER

SEQ ID NO: 683 - protein, 13 aa, Unknown
  Environmental Sample
DADKDGHITLAEA

SEQ ID NO: 684 - protein, 13 aa, Unknown
  Environmental Sample
DRNKDGIIQTIVL

SEQ ID NO: 685 - protein, 13 aa, Unknown
  Environmental Sample
DTNGNGRLDREDE

SEQ ID NO: 686 - protein, 13 aa, Unknown
  Environmental Sample
DVNGDGSLDLFDF

SEQ ID NO: 687 - protein, 13 aa, Unknown
  Environmental Sample
DFDGDCSLTLFDF

SEQ ID NO: 688 - protein, 13 aa, Unknown
  Environmental Sample
DLDHSRFISKHEA

SEQ ID NO: 689 - protein, 13 aa, Unknown
  Environmental Sample
DLDGDGAVSREEF

SEQ ID NO: 690 - protein, 13 aa, Unknown
  Environmental Sample
DSDGDGTISAEEL

SEQ ID NO: 691 - protein, 13 aa, Unknown
  Environmental Sample
DADGDGKVTPEEM

SEQ ID NO: 692 - protein, 13 aa, Unknown
  Environmental Sample
DGDGDGSLSIAEF

SEQ ID NO: 693 - protein, 13 aa, Unknown
  Environmental Sample
DADGDGAVTAEEM

SEQ ID NO: 694 - protein, 13 aa, Unknown
  Environmental Sample
DTDGDGGITLREA

SEQ ID NO: 695 - protein, 13 aa, Unknown
  Environmental Sample
DYDGNGKLTANEL

SEQ ID NO: 696 - protein, 13 aa, Unknown
  Environmental Sample
DLDGNGEIDVREW

SEQ ID NO: 697 - protein, 13 aa, Unknown
  Environmental Sample
DADGDGRVSLAEY

SEQ ID NO: 698 - protein, 13 aa, Unknown
  Environmental Sample
DRNGDGILQDGEL

SEQ ID NO: 699 - protein, 13 aa, Unknown
  Environmental Sample
DRDGDGHLDAAEL

SEQ ID NO: 700 - protein, 13 aa, Unknown
  Environmental Sample
DTDGDYYLSQIEF

SEQ ID NO: 701 - protein, 13 aa, Unknown
  Environmental Sample
DRNSDGRLSVAEY

SEQ ID NO: 702 - protein, 13 aa, Unknown
  Environmental Sample
KYSKNGYMSRFQF

SEQ ID NO: 703 - protein, 13 aa, Unknown
  Environmental Sample
DQDGDGALSFKEF

SEQ ID NO: 704 - protein, 13 aa, Unknown
  Environmental Sample
DRDGDGRVDGDEW

SEQ ID NO: 705 - protein, 13 aa, Unknown
  Environmental Sample
DNDGDGRITSVGI

SEQ ID NO: 706 - protein, 13 aa, Unknown
  Environmental Sample
DLDGDGYLSPAEA

SEQ ID NO: 707 - protein, 13 aa, Unknown
  Environmental Sample
DVNKDGVIDPDEF

SEQ ID NO: 708 - protein, 13 aa, Unknown
  Environmental Sample
DYDGDGRISRAEF

SEQ ID NO: 709 - protein, 13 aa, Unknown
  Environmental Sample
DRDNDGVLSLDEW

SEQ ID NO: 710 - protein, 13 aa, Unknown
  Environmental Sample
DTDKSGTVTRVEI

SEQ ID NO: 711 - protein, 13 aa, Unknown
  Environmental Sample
DTDNDGSLTREEA

SEQ ID NO: 712 - protein, 13 aa, Unknown
  Environmental Sample
DADKSGAVTGKEI

SEQ ID NO: 713 - protein, 13 aa, Unknown
  Environmental Sample
DKDNDGSLTREEA

SEQ ID NO: 714 - protein, 13 aa, Unknown
  Environmental Sample
DCDEDGELTLFDF

SEQ ID NO: 715 - protein, 13 aa, Unknown
  Environmental Sample
DIDGDGQLTIFDF

SEQ ID NO: 716 - protein, 13 aa, Unknown
  Environmental Sample
DLDGDGEIGFGDL

SEQ ID NO: 717 - protein, 13 aa, Unknown
  Environmental Sample
DVNGDGVVNFTDL

SEQ ID NO: 718 - protein, 13 aa, Unknown
  Environmental Sample
DADNDGKLELIQA

SEQ ID NO: 719 - protein, 13 aa, Unknown
  Environmental Sample
DINGDGRLETAIA

SEQ ID NO: 720 - protein, 13 aa, Unknown
  Environmental Sample
DINGDGTVSEEDL

SEQ ID NO: 721 - protein, 13 aa, Unknown
  Environmental Sample
DKDKDGKLTELEL

SEQ ID NO: 722 - protein, 13 aa, Unknown
  Environmental Sample
DANGDGYVSKKEF

SEQ ID NO: 723 - protein, 13 aa, Unknown
  Environmental Sample
DTNKDGMLSKQEL

SEQ ID NO: 724 - protein, 13 aa, Unknown
  Environmental Sample
DANGDGQISKEEF

SEQ ID NO: 725 - protein, 13 aa, Unknown
  Environmental Sample
DYDDNGVVSLSEL

SEQ ID NO: 726 - protein, 13 aa, Unknown
  Environmental Sample
DVSGDGNLSTAEI

SEQ ID NO: 727 - protein, 13 aa, Unknown
  Environmental Sample
DADADGRITQEEM

SEQ ID NO: 728 - protein, 13 aa, Unknown
  Environmental Sample
DADGDGALSRDEL

SEQ ID NO: 729 - protein, 13 aa, Unknown
  Environmental Sample
DSDGDGKLSPDEM

SEQ ID NO: 730 - protein, 13 aa, Unknown
  Environmental Sample
DADGDGAITEAEF

SEQ ID NO: 731 - protein, 13 aa, Unknown
  Environmental Sample
DLDGDGKLEVVVG

SEQ ID NO: 732 - protein, 13 aa, Unknown
  Environmental Sample
DGDGEEEVLISAA

SEQ ID NO: 733 - protein, 13 aa, Unknown
  Environmental Sample
DRDRDGEISLEEW

SEQ ID NO: 734 - protein, 13 aa, Unknown
  Environmental Sample
DTDGDGRITSADL

SEQ ID NO: 735 - protein, 13 aa, Unknown
  Environmental Sample
DADKDGKVTSADL

SEQ ID NO: 736 - protein, 13 aa, Unknown
  Environmental Sample
DRNKNGRIDKEDF

SEQ ID NO: 737 - protein, 13 aa, Unknown
  Environmental Sample
DTDGNGSISKEEF

SEQ ID NO: 738 - protein, 13 aa, Unknown
  Environmental Sample
DTDNDGVITRAEF

SEQ ID NO: 739 - protein, 13 aa, Unknown
  Environmental Sample
DTDGDGTITDAER

SEQ ID NO: 740 - protein, 13 aa, Unknown
  Environmental Sample
DVNDDGQLDKADR

SEQ ID NO: 741 - protein, 13 aa, Unknown
  Environmental Sample
DSDGNGVLDDSEW

SEQ ID NO: 742 - protein, 13 aa, Unknown
  Environmental Sample
IAGMDGQISEEDW

SEQ ID NO: 743 - protein, 13 aa, Unknown
  Environmental Sample
DTNADGMISATEF

SEQ ID NO: 744 - protein, 13 aa, Unknown
  Environmental Sample
DRNGDGKIDLEEW

SEQ ID NO: 745 - protein, 13 aa, Unknown
  Environmental Sample
DDNGNGALDPSEW

SEQ ID NO: 746 - protein, 13 aa, Unknown
  Environmental Sample
DLDRDGSISRQEA

SEQ ID NO: 747 - protein, 13 aa, Unknown
  Environmental Sample
DTNGDGTLTPDEL

SEQ ID NO: 748 - protein, 13 aa, Unknown
  Environmental Sample
DFDGDGSLTLFDF

SEQ ID NO: 749 - protein, 13 aa, Unknown
  Environmental Sample
DTNGNGELDAGDL

SEQ ID NO: 750 - protein, 13 aa, Unknown
  Environmental Sample
DLDGDGALTLFDF

SEQ ID NO: 751 - protein, 13 aa, Unknown
  Environmental Sample
DKNADRMISLDEF

SEQ ID NO: 752 - protein, 13 aa, Unknown
  Environmental Sample
DSDRSGGLDTVEF

SEQ ID NO: 753 - protein, 13 aa, Unknown
  Environmental Sample
DSNHDKKLDFAEY

SEQ ID NO: 754 - protein, 13 aa, Unknown
  Environmental Sample
DEDRDGNLDPQEW

SEQ ID NO: 755 - protein, 13 aa, Unknown
  Environmental Sample
NKDNNGYLTPSEF

SEQ ID NO: 756 - protein, 13 aa, Unknown
  Environmental Sample
DRDGDGKVSSDEF

SEQ ID NO: 757 - protein, 13 aa, Unknown
  Environmental Sample
DRNRDGFISADEA

SEQ ID NO: 758 - protein, 13 aa, Unknown
  Environmental Sample
DADGNGKLTRDEI

SEQ ID NO: 759 - protein, 13 aa, Unknown
  Environmental Sample
DRDGDGNVGTDEI

SEQ ID NO: 760 - protein, 13 aa, Unknown
  Environmental Sample
DADGDGAIGATEF

SEQ ID NO: 761 - protein, 13 aa, Unknown
  Environmental Sample
DADSNGAVSREEL

SEQ ID NO: 762 - protein, 13 aa, Unknown
  Environmental Sample
DRDCSGSISYTEL

SEQ ID NO: 763 - protein, 13 aa, Unknown
  Environmental Sample
DKTKSGRIDVYGF

SEQ ID NO: 764 - protein, 13 aa, Unknown
  Environmental Sample
DTDNNGLISLSEL

SEQ ID NO: 765 - protein, 13 aa, Unknown
  Environmental Sample
DTDQDGRITPLEL

SEQ ID NO: 766 - protein, 13 aa, Unknown
  Environmental Sample
DVNGDGVVDILDF

SEQ ID NO: 767 - protein, 13 aa, Unknown
  Environmental Sample
DLDGDGGKSTGQF

SEQ ID NO: 768 - protein, 13 aa, Unknown
  Environmental Sample
DGNRDGKVSREEL

SEQ ID NO: 769 - protein, 13 aa, Unknown
  Environmental Sample
DADKDGTLTRDEM

SEQ ID NO: 770 - protein, 13 aa, Unknown
  Environmental Sample
DTNGDGNVSKAEF

SEQ ID NO: 771 - protein, 13 aa, Unknown
  Environmental Sample
DADRSGSLTAAEF

SEQ ID NO: 772 - protein, 13 aa, Unknown
  Environmental Sample
DTDGNGVISQAEW

SEQ ID NO: 773 - protein, 13 aa, Unknown
  Environmental Sample
DKNSDGVLTSTER

SEQ ID NO: 774 - protein, 13 aa, Unknown
  Environmental Sample
DLNGDGVVSAEEM

SEQ ID NO: 775 - protein, 13 aa, Unknown
  Environmental Sample
DADGDGKISRAES

SEQ ID NO: 776 - protein, 13 aa, Unknown
  Environmental Sample
DTNGDGVVSPEEL

SEQ ID NO: 777 - protein, 13 aa, Unknown
  Environmental Sample
DGNGDGALSASEL

SEQ ID NO: 778 - protein, 13 aa, Unknown
  Environmental Sample
DKDGDGFLTEDEL

SEQ ID NO: 779 - protein, 13 aa, Unknown
  Environmental Sample
DHDGDGALDNKEW

SEQ ID NO: 780 - protein, 13 aa, Unknown
  Environmental Sample
DENKDGILEMKEV

SEQ ID NO: 781 - protein, 13 aa, Unknown
  Environmental Sample
DRDGNGVIDNQEF

SEQ ID NO: 782 - protein, 13 aa, Unknown
  Environmental Sample
DMTHDNLLDHEEW

SEQ ID NO: 783 - protein, 13 aa, Unknown
  Environmental Sample
DKNHDGKVSIGER

SEQ ID NO: 784 - protein, 13 aa, Unknown
  Environmental Sample
DRDKDGDVDFDDF

SEQ ID NO: 785 - protein, 13 aa, Unknown
  Environmental Sample
DTNGDGKVEFDEI

SEQ ID NO: 786 - protein, 13 aa, Unknown
  Environmental Sample
DDDGDGTIDEEEC

SEQ ID NO: 787 - protein, 13 aa, Unknown
  Environmental Sample
DDDGDGMIDENCQ

SEQ ID NO: 788 - protein, 13 aa, Unknown
  Environmental Sample
DTDGSGMIDRTEA

SEQ ID NO: 789 - protein, 13 aa, Unknown
  Environmental Sample
DPNGIGPDEFSQA

SEQ ID NO: 790 - protein, 13 aa, Unknown
  Environmental Sample
DKNRDGFLTRAEM

SEQ ID NO: 791 - protein, 13 aa, Unknown
  Environmental Sample
DANKDGRLSQEEF

SEQ ID NO: 792 - protein, 13 aa, Unknown
  Environmental Sample
DINGDGNISLQEW

SEQ ID NO: 793 - protein, 13 aa, Unknown
  Environmental Sample
DANNDGRVSRSEW

SEQ ID NO: 794 - protein, 13 aa, Unknown
  Environmental Sample
DHDHNGWLSRGEF

SEQ ID NO: 795 - protein, 13 aa, Unknown
  Environmental Sample
DHNRDNRITRDEW

SEQ ID NO: 796 - protein, 13 aa, Unknown
  Environmental Sample
DWNRDGMLSGDEL

SEQ ID NO: 797 - protein, 13 aa, Unknown
  Environmental Sample
DTNHDGILQRSEW

SEQ ID NO: 798 - protein, 13 aa, Unknown
  Environmental Sample
DRNGDGYFSKDDL

SEQ ID NO: 799 - protein, 13 aa, Unknown
  Environmental Sample
DSNRDNQVSKAEL

SEQ ID NO: 800 - protein, 13 aa, Unknown
  Environmental Sample
DRNGDGAVSRAEF

SEQ ID NO: 801 - protein, 13 aa, Unknown
  Environmental Sample
DKNRDGRISRAEF

SEQ ID NO: 802 - protein, 13 aa, Unknown
  Environmental Sample
DLDGDGELTLFDF

SEQ ID NO: 803 - protein, 13 aa, Unknown
  Environmental Sample
DFDRDGDLTLFDF

SEQ ID NO: 804 - protein, 13 aa, Unknown
  Environmental Sample
DRDSDGKLEADDL

SEQ ID NO: 805 - protein, 13 aa, Unknown
  Environmental Sample
DKEGKGMIPSGEL

SEQ ID NO: 806 - protein, 13 aa, Unknown
  Environmental Sample
DPTGSGTVDYEQF

SEQ ID NO: 807 - protein, 13 aa, Unknown
  Environmental Sample
DRDGDGALTAADA

SEQ ID NO: 808 - protein, 13 aa, Unknown
  Environmental Sample
DRNGDGHIDRQDR

SEQ ID NO: 809 - protein, 13 aa, Unknown
  Environmental Sample
DTNQDRQVSAEEF

SEQ ID NO: 810 - protein, 13 aa, Unknown
  Environmental Sample
DVNKDGTVTFEEA

SEQ ID NO: 811 - protein, 13 aa, Unknown
  Environmental Sample
DADGDGRVTQAEV

SEQ ID NO: 812 - protein, 13 aa, Unknown
  Environmental Sample
DKNGDGVLTKADR

SEQ ID NO: 813 - protein, 13 aa, Unknown
  Environmental Sample
DVNGDGVVNFTDL

SEQ ID NO: 814 - protein, 13 aa, Unknown
  Environmental Sample
DTDGDGDVDFEDL

SEQ ID NO: 815 - protein, 13 aa, Unknown
  Environmental Sample
DINRDGRIDSRDI

SEQ ID NO: 816 - protein, 13 aa, Unknown
  Environmental Sample
DVNGDGVVDTYDL

SEQ ID NO: 817 - protein, 13 aa, Unknown
  Environmental Sample
DLDHSRFISKQEA

SEQ ID NO: 818 - protein, 13 aa, Unknown
  Environmental Sample
DSDSDGTVDNAEE

SEQ ID NO: 819 - protein, 13 aa, Unknown
  Environmental Sample
DLDQDGVVDANEL

SEQ ID NO: 820 - protein, 13 aa, Unknown
  Environmental Sample
DANKDGVVTRDEM

SEQ ID NO: 821 - protein, 13 aa, Unknown
  Environmental Sample
DTNKDGKLDEADR

SEQ ID NO: 822 - protein, 13 aa, Unknown
  Environmental Sample
DANKDGKLTPEER

SEQ ID NO: 823 - protein, 13 aa, Unknown
  Environmental Sample
DANKDGNISRDEF

SEQ ID NO: 824 - protein, 13 aa, Unknown
  Environmental Sample
DTNTDGKISREEA

SEQ ID NO: 825 - protein, 13 aa, Unknown
  Environmental Sample
DLNKDGFMDKGEL

SEQ ID NO: 826 - protein, 13 aa, Unknown
  Environmental Sample
KLNQSGFIDFEEL

SEQ ID NO: 827 - protein, 13 aa, Unknown
  Environmental Sample
DKDRDGRLTPREF

SEQ ID NO: 828 - protein, 13 aa, Unknown
  Environmental Sample
DADGNNLLTFEEW

SEQ ID NO: 829 - protein, 13 aa, Unknown
  Environmental Sample
DRNRDRLITRNEM

SEQ ID NO: 830 - protein, 13 aa, Unknown
  Environmental Sample
DINGDGVVSKEEF

SEQ ID NO: 831 - protein, 13 aa, Unknown
  Environmental Sample
DADASGSVSQSEL

SEQ ID NO: 832 - protein, 13 aa, Unknown
  Environmental Sample
DADGNGAISEDEW

SEQ ID NO: 833 - protein, 13 aa, Unknown
  Environmental Sample
DKNKDGVLSADER

SEQ ID NO: 834 - protein, 13 aa, Unknown
  Environmental Sample
CPTGHLTVDEFKK

SEQ ID NO: 835 - protein, 13 aa, Unknown
  Environmental Sample
DTNGDGTIDFREF

SEQ ID NO: 836 - protein, 13 aa, Unknown
  Environmental Sample
DLDGNGYISRSEM

SEQ ID NO: 837 - protein, 13 aa, Unknown
  Environmental Sample
DRDRNDRISRVEL

SEQ ID NO: 838 - protein, 13 aa, Unknown
  Environmental Sample
DKDGNNLLTFEEW

SEQ ID NO: 839 - protein, 13 aa, Unknown
  Environmental Sample
DLDLDGDVDFTDL

SEQ ID NO: 840 - protein, 13 aa, Unknown
  Environmental Sample
DVNNDGLVDFSDL

SEQ ID NO: 841 - protein, 13 aa, Unknown
  Environmental Sample
DRNGDGRLTAEEI

SEQ ID NO: 842 - protein, 13 aa, Unknown
  Environmental Sample
DADRDGVLTRAEV

SEQ ID NO: 843 - protein, 13 aa, Unknown
  Environmental Sample
DTNGDGIVDRGEM

SEQ ID NO: 844 - protein, 13 aa, Unknown
  Environmental Sample
DTNRDGRVTRAEF

SEQ ID NO: 845 - protein, 13 aa, Unknown
  Environmental Sample
DLDGDGEIDLKEW

SEQ ID NO: 846 - protein, 13 aa, Unknown
  Environmental Sample
DLDHDGVLTIFDY

SEQ ID NO: 847 - protein, 13 aa, Unknown
  Environmental Sample
DFDGDGELTLFDF

SEQ ID NO: 848 - protein, 13 aa, Unknown
  Environmental Sample
DKDKNGSLSRTEF

SEQ ID NO: 849 - protein, 13 aa, Unknown
  Environmental Sample
DANRDGQLSSAEA

SEQ ID NO: 850 - protein, 13 aa, Unknown
  Environmental Sample
DTDGDGQLSRDEI

SEQ ID NO: 851 - protein, 13 aa, Unknown
  Environmental Sample
DADGNGAISPEEF

SEQ ID NO: 852 - protein, 13 aa, Unknown
  Environmental Sample
DGDGDGMVSIEEL

SEQ ID NO: 853 - protein, 13 aa, Unknown
  Environmental Sample
DVDKDGYLTGSEL

SEQ ID NO: 854 - protein, 13 aa, Unknown
  Environmental Sample
DVNNDGLVDFSDL

SEQ ID NO: 855 - protein, 13 aa, Unknown
  Environmental Sample
DLDLDGDVDFTDL

SEQ ID NO: 856 - protein, 13 aa, Unknown
  Environmental Sample
DADGNGKVSRDEY

SEQ ID NO: 857 - protein, 13 aa, Unknown
  Environmental Sample
EKDGDGYISQDEF

SEQ ID NO: 858 - protein, 13 aa, Unknown
  Environmental Sample
NSSGSGKISLAEA

SEQ ID NO: 859 - protein, 13 aa, Unknown
  Environmental Sample
DKNHSGYVTWDEF

SEQ ID NO: 860 - protein, 13 aa, Unknown
  Environmental Sample
DLDGDGALSMFEL

SEQ ID NO: 861 - protein, 13 aa, Unknown
  Environmental Sample
DKDGDGKITSNRE

SEQ ID NO: 862 - protein, 13 aa, Unknown
  Environmental Sample
DTNKDGKISKAEY

SEQ ID NO: 863 - protein, 13 aa, Unknown
  Environmental Sample
DTNKDGFISAAEM

SEQ ID NO: 864 - protein, 13 aa, Unknown
  Environmental Sample
DRDGDGVVSVAEF

SEQ ID NO: 865 - protein, 13 aa, Unknown
  Environmental Sample
DTNGDNFVSLAEL

SEQ ID NO: 866 - protein, 13 aa, Unknown
  Environmental Sample
DVDQNGNIDYSQL

SEQ ID NO: 867 - protein, 13 aa, Unknown
  Environmental Sample
DSDKDGVVTVAEM

SEQ ID NO: 868 - protein, 13 aa, Unknown
  Environmental Sample
DADRNGQLSAAEF

SEQ ID NO: 869 - protein, 13 aa, Unknown
  Environmental Sample
DGDKNGKVTRAEI

SEQ ID NO: 870 - protein, 13 aa, Unknown
  Environmental Sample
DTNKDGAVSLIEH

SEQ ID NO: 871 - protein, 13 aa, Unknown
  Environmental Sample
DVNGDGVINFADL

SEQ ID NO: 872 - protein, 13 aa, Unknown
  Environmental Sample
DFDNDGVINFGDL

SEQ ID NO: 873 - protein, 13 aa, Unknown
  Environmental Sample
DSDRDGRITTIEY

SEQ ID NO: 874 - protein, 13 aa, Unknown
  Environmental Sample
DSNRDGWLTLYEA

SEQ ID NO: 875 - protein, 13 aa, Unknown
  Environmental Sample
DKNGDGKLDDAER

SEQ ID NO: 876 - protein, 13 aa, Unknown
  Environmental Sample
DKDGDGKLSDAER

SEQ ID NO: 877 - protein, 13 aa, Unknown
  Environmental Sample
DADRNGQLTRDEF

SEQ ID NO: 878 - protein, 13 aa, Unknown
  Environmental Sample
DLSKTGQLTDEQL

SEQ ID NO: 879 - protein, 13 aa, Unknown
  Environmental Sample
DANQDGKLARDEF

SEQ ID NO: 880 - protein, 13 aa, Unknown
  Environmental Sample
DANQDARLSEEEF

SEQ ID NO: 881 - protein, 13 aa, Unknown
  Environmental Sample
DTDETGVLTEQQL

SEQ ID NO: 882 - protein, 13 aa, Unknown
  Environmental Sample
DEDQDGQVTREEF

SEQ ID NO: 883 - protein, 13 aa, Unknown
  Environmental Sample
DLDGSGRVSVEEA

SEQ ID NO: 884 - protein, 13 aa, Unknown
  Environmental Sample
DRDGDGEVTDEGL

SEQ ID NO: 885 - protein, 13 aa, Unknown
  Environmental Sample
DLNQDGVIDRSTE

SEQ ID NO: 886 - protein, 13 aa, Unknown
  Environmental Sample
DKNQDGIIQAVIL

SEQ ID NO: 887 - protein, 13 aa, Unknown
  Environmental Sample
DASGDGKLDGDEL

SEQ ID NO: 888 - protein, 13 aa, Unknown
  Environmental Sample
DRNLDGQLAQPEL

SEQ ID NO: 889 - protein, 13 aa, Unknown
  Environmental Sample
DMDDDGRLNSMEF

SEQ ID NO: 890 - protein, 13 aa, Unknown
  Environmental Sample
DVDRDGKIGLPEV

SEQ ID NO: 891 - protein, 13 aa, Unknown
  Environmental Sample
DFDGSGAADLADA

SEQ ID NO: 892 - protein, 13 aa, Unknown
  Environmental Sample
DSNEDGYYSKAEA

SEQ ID NO: 893 - protein, 13 aa, Unknown
  Environmental Sample
DVDGDNRLSREEY

SEQ ID NO: 894 - protein, 13 aa, Unknown
  Environmental Sample
DRDGDGFITLQEG

SEQ ID NO: 895 - protein, 13 aa, Unknown
  Environmental Sample
DLDGNRVYDETEF

SEQ ID NO: 896 - protein, 13 aa, Unknown
  Environmental Sample
DADKSGDLTRAEF

SEQ ID NO: 897 - protein, 13 aa, Unknown
  Environmental Sample
DKDGNNLLTFEEW

SEQ ID NO: 898 - protein, 13 aa, Unknown
  Environmental Sample
DRDRNDRISRVEM

SEQ ID NO: 899 - protein, 13 aa, Unknown
  Environmental Sample
DADKNRALSPAEY

SEQ ID NO: 900 - protein, 13 aa, Unknown
  Environmental Sample
DLNQDGKLSFEEW

SEQ ID NO: 901 - protein, 13 aa, Unknown
  Environmental Sample
DKDENGRITLAEL

SEQ ID NO: 902 - protein, 13 aa, Unknown
  Environmental Sample
DQDGNGKISPMEL

SEQ ID NO: 903 - protein, 13 aa, Unknown
  Environmental Sample
DFDGDGDVDAADL

SEQ ID NO: 904 - protein, 13 aa, Unknown
  Environmental Sample
DLDGDGRLDLDFD

SEQ ID NO: 905 - protein, 13 aa, Unknown
  Environmental Sample
DKNGDGVVSISEA

SEQ ID NO: 906 - protein, 13 aa, Unknown
  Environmental Sample
KEDKKGRVTRREI

SEQ ID NO: 907 - protein, 13 aa, Unknown
  Environmental Sample
DKDKDGSLSRAEA

SEQ ID NO: 908 - protein, 13 aa, Unknown
  Environmental Sample
DANKDGKISAEEF

SEQ ID NO: 909 - protein, 13 aa, Unknown
  Environmental Sample
DANNDGVLTLEEL

SEQ ID NO: 910 - protein, 13 aa, Unknown
  Environmental Sample
DTNKNGRIEKDEY

SEQ ID NO: 911 - protein, 13 aa, Unknown
  Environmental Sample
NKGYCTFEEVAEG

SEQ ID NO: 912 - protein, 13 aa, Unknown
  Environmental Sample
DVDNDGLISIEDL

SEQ ID NO: 913 - protein, 13 aa, Unknown
  Environmental Sample
DTDNDGKVDVAEL

SEQ ID NO: 914 - protein, 13 aa, Unknown
  Environmental Sample
DVNNDGIISDEEL

SEQ ID NO: 915 - protein, 13 aa, Unknown
  Environmental Sample
DDNADGAISKEEM

SEQ ID NO: 916 - protein, 13 aa, Unknown
  Environmental Sample
DADQDGFISPAEL

SEQ ID NO: 917 - protein, 13 aa, Unknown
  Environmental Sample
DADQDGKLSAEEM

SEQ ID NO: 918 - protein, 13 aa, Unknown
  Environmental Sample
DADQNGQITKEEL

SEQ ID NO: 919 - protein, 13 aa, Unknown
  Environmental Sample
DADKNGTVTMEER

SEQ ID NO: 920 - protein, 13 aa, Unknown
  Environmental Sample
DANKDGRVDAADR

SEQ ID NO: 921 - protein, 13 aa, Unknown
  Environmental Sample
DADRNGQISREEF

SEQ ID NO: 922 - protein, 13 aa, Unknown
  Environmental Sample
DANKDGAITKEEY

SEQ ID NO: 923 - protein, 13 aa, Unknown
  Environmental Sample
DANSDGNLDKAEQ

SEQ ID NO: 924 - protein, 13 aa, Unknown
  Environmental Sample
DRDADGLIQVSIQ

SEQ ID NO: 925 - protein, 13 aa, Unknown
  Environmental Sample
DSDTTGKLGFEEF

SEQ ID NO: 926 - protein, 13 aa, Unknown
  Environmental Sample
DRDQSGFLGSSQL

SEQ ID NO: 927 - protein, 13 aa, Unknown
  Environmental Sample
YAEEDGSMDFNNF

SEQ ID NO: 928 - protein, 13 aa, Unknown
  Environmental Sample
DSNRDGFVSQAEA

SEQ ID NO: 929 - protein, 13 aa, Unknown
  Environmental Sample
DKNRDSIITRAEF

SEQ ID NO: 930 - protein, 13 aa, Unknown
  Environmental Sample
DANKDGSITRAEA

SEQ ID NO: 931 - protein, 13 aa, Unknown
  Environmental Sample
DANKDGRVSLAEA

SEQ ID NO: 932 - protein, 13 aa, Unknown
  Environmental Sample
DLNRDGQVTPDER

SEQ ID NO: 933 - protein, 13 aa, Unknown
  Environmental Sample
DTNGDGLISRAEA

SEQ ID NO: 934 - protein, 13 aa, Unknown
  Environmental Sample
DANKDGQLSREEM

SEQ ID NO: 935 - protein, 13 aa, Unknown
  Environmental Sample
DSDNNSRLTRAEI

SEQ ID NO: 936 - protein, 13 aa, Unknown
  Environmental Sample
DANTSGDLDYNEI

SEQ ID NO: 937 - protein, 13 aa, Unknown
  Environmental Sample
DCDEDGELTLFDF

SEQ ID NO: 938 - protein, 13 aa, Unknown
  Environmental Sample
DIDGDGQLTIFDF

SEQ ID NO: 939 - protein, 13 aa, Unknown
  Environmental Sample
DVNRDGQITVGEI

SEQ ID NO: 940 - protein, 13 aa, Unknown
  Environmental Sample
DANRDGVITRAEI

SEQ ID NO: 941 - protein, 13 aa, Unknown
  Environmental Sample
DLNRDGKVTQAEF

SEQ ID NO: 942 - protein, 13 aa, Unknown
  Environmental Sample
DKNRDGQITRAEF

SEQ ID NO: 943 - protein, 13 aa, Unknown
  Environmental Sample
DADRDGILDRAEL

SEQ ID NO: 944 - protein, 13 aa, Unknown
  Environmental Sample
DRNQDGALDEEEF

SEQ ID NO: 945 - protein, 13 aa, Unknown
  Environmental Sample
DANGDGRLDAEEI

SEQ ID NO: 946 - protein, 13 aa, Unknown
  Environmental Sample
DLDRNGRIDLDEL

SEQ ID NO: 947 - protein, 13 aa, Unknown
  Environmental Sample
DADKDGTLTRDEM

SEQ ID NO: 948 - protein, 13 aa, Unknown
  Environmental Sample
DENRDGKVSRDEL

SEQ ID NO: 949 - protein, 13 aa, Unknown
  Environmental Sample
DHDGNGEIDLDEW

SEQ ID NO: 950 - protein, 13 aa, Unknown
  Environmental Sample
DADGDGRVEARKR

SEQ ID NO: 951 - protein, 13 aa, Unknown
  Environmental Sample
DTNGDGLFDYRET

SEQ ID NO: 952 - protein, 13 aa, Unknown
  Environmental Sample
CPERDGRIDLDEF

SEQ ID NO: 953 - protein, 13 aa, Unknown
  Environmental Sample
DLDGNGELDLQEW

SEQ ID NO: 954 - protein, 13 aa, Unknown
  Environmental Sample
DRNRDRVITRDEM

SEQ ID NO: 955 - protein, 13 aa, Unknown
  Environmental Sample
DVDGNNLLTFEEW

SEQ ID NO: 956 - protein, 13 aa, Unknown
  Environmental Sample
DGNGDGRLTPREF

SEQ ID NO: 957 - protein, 13 aa, Unknown
  Environmental Sample
DADADGRVTRGEL

SEQ ID NO: 958 - protein, 13 aa, Unknown
  Environmental Sample
DRDGDGRLSVDEL

SEQ ID NO: 959 - protein, 13 aa, Unknown
  Environmental Sample
DADGDGMLSRAEI

SEQ ID NO: 960 - protein, 13 aa, Unknown
  Environmental Sample
DTDGDGAVTEAEM

SEQ ID NO: 961 - protein, 13 aa, Unknown
  Environmental Sample
DANGDGRIDAGEM

SEQ ID NO: 962 - protein, 13 aa, Unknown
  Environmental Sample
DADGDGMVSRDEM

SEQ ID NO: 963 - protein, 13 aa, Unknown
  Environmental Sample
DEDRDGFLTRADI

SEQ ID NO: 964 - protein, 13 aa, Unknown
  Environmental Sample
DLNRDGYLVASEV

SEQ ID NO: 965 - protein, 13 aa, Unknown
  Environmental Sample
DTDGDGRISKLEA

SEQ ID NO: 966 - protein, 13 aa, Unknown
  Environmental Sample
DKNGDGQLDAGER

SEQ ID NO: 967 - protein, 13 aa, Unknown
  Environmental Sample
DANQDGVIDRSEA

SEQ ID NO: 968 - protein, 13 aa, Unknown
  Environmental Sample
DTNADGRLDRAEV

SEQ ID NO: 969 - protein, 13 aa, Unknown
  Environmental Sample
DGNGDGYLSRAEF

SEQ ID NO: 970 - protein, 13 aa, Unknown
  Environmental Sample
DLDGDGRISLAEF

SEQ ID NO: 971 - protein, 13 aa, Unknown
  Environmental Sample
DLDGNDVLEPHEQ

SEQ ID NO: 972 - protein, 13 aa, Unknown
  Environmental Sample
DADGNGYIDYVGS

SEQ ID NO: 973 - protein, 13 aa, Unknown
  Environmental Sample
DVDGNGYIDYVGS

SEQ ID NO: 974 - protein, 13 aa, Unknown
  Environmental Sample
DLDGDGEIDMREW

SEQ ID NO: 975 - protein, 13 aa, Unknown
  Environmental Sample
DLDHDGVLTIFDY

SEQ ID NO: 976 - protein, 13 aa, Unknown
  Environmental Sample
DFDGDGELTLFDF

SEQ ID NO: 977 - protein, 13 aa, Unknown
  Environmental Sample
DKDQDGTISVRTT

SEQ ID NO: 978 - DNA, 369 bp, Artificial Sequence
  Synthetic Polynucleotide
atgcaccatcatcaccatcatggtggttctggtgcgccaactacgactaccaaagttgatatcgcggcgtttgacccggacaaagatgggaccatcgatctgaaagaggctttggcggcaggttccgcggccttcgacaagttggacccggataaagatggtactctggacgccaaagagctgaagggccgcgtgtctgaggcagaccttaagaagctggaccctgacaatgacggaaccctggacaagaaagagtacttagcagcggtagaggcacagtttaaggccgctaaccctgacaacgatggcactattgacgcccgtgaacttgcaagcccagcggggtcggccctggtcaacttaattcgt

SEQ ID NO: 979 - DNA, 351 bp, Artificial Sequence
  Synthetic Polynucleotide
atgcaccatcatcaccatcatggtggttctggtatgaaacaccaccaccaccaccacggtccgggctacattgacaccaacaacgatggttggtatgagggcgacgaactgctggcgatgcagatcttcgtgaagaccctgaccggtaaaaccattaccctggaagtggaaccgagcgataccatcgagaacgttaaggcgaaaatccaagacaaggaaggcattccgccggatcagcaacgtctgatttttgcgggtaaacagctggaggacggccgtaccctgagcgattacaacatccaaaaggaaagcaccctgcacctggttctgcgtctgcgtggtggctgataa

SEQ ID NO: 980 - DNA, 354 bp, Artificial Sequence
  Synthetic Polynucleotide
atgcaccatcatcaccatcatggtggttctggtatgaaacaccatcatcaccaccacggtccgggtgcgtgcgcggactacaacaaggatggttggtatgaggaactggagtgcgcggcgatgcagatcttcgtgaagaccctgaccggcaaaaccattaccctggaagtggaaccgagcgacaccatcgagaacgttaaggcgaaaatccaagacaaggaaggtattccgccggatcagcaacgtctgatttttgcgggtaaacagctggaggacggccgtaccctgagcgattacaacatccaaaaggaaagcaccctgcacctggttctgcgtctgcgtggtggctgataa

SEQ ID NO: 981 - DNA, 567 bp, Artificial Sequence
  Synthetic Polynucleotide
atgcaccatcatcaccatcatggtggttctggttcttcggctctcgcattcgcgtcatttcagcaacaggagatttccatgaaaactatcaacacgcgcattttagaccttaccctggccggcgcgttgagcgtatttacaaccgccagcgcgctggctgcgcctacggttatgccgggattcaagaccgcagatggtaatggggataacatggtcagtctgcaagaatttcaggaaaaaggcggtttcgaacaagcctttcacgagggcgatgctaatcgggaccgtcgtttaagtgatgacgaatacactaaagcaatagcgaacaacgatcgactgcaagccggaaaatatatcgatgatgcagtgattaccgcgaaagtgaaggctctgatcctaaaagacgaaggtgtcaaaggcctggaggttaatgtggaaacacatcaggggatggtgcagctagcgggttgggttgacacgccaacccagattgcacaggccgaaaagattgccaggagcgtcgagggcgtgaaaggtgtacgcaacgcgttgctgatcaaacgttga

SEQ ID NO: 982 - DNA, 744 bp, Artificial Sequence
  Synthetic Polynucleotide
atgcaccatcatcaccatcatggtggttctggtagttctattggaagcgtaggttcgacagcagctatgatgcagtcaatgtccgcgatgcgtaggcctagcgccgcggatatggccaacaagctcttttcggcgcttgacactcaaggccagggctacttagagaaatctgatttggcaagtgcgctgagccagatcgggagcaccggtgaatccgaactggacgaggttttcgctcaactggatgccgattcagatgggaaactcacgcagaccgaattgacggactctctgcaacgcctgtccgatcagctagatcagcaatttgacagcctgcgaatgcagggcgctatgggcggtatgggcggaatgggtgggatgccaccgcccccgccgccggcccaagacagcggtttcactgaagacgaattaaatgcgcagctggcggaaataggcgataccgatgatgtccgtgcagatctcctggagacggtgctaaacaatttttcggcggccgatacagatggtgacggcaaagtgtcgttcaccgaagcgatggccgcaaaacaggctgctgacgggagtgcggctgcaaccggcactggcacctccaccgcggcagccagcggtgctagtagtgatgacggactgaaggttatgatgcagatcatgcgccttatgcaagcatatggtgattcggaacaaggtacgcgtcctgcggcggccatttcagtgaacgcctga

SEQ ID NO: 983 - DNA, 450 bp, Artificial Sequence
  Synthetic Polynucleotide
atgcaccatcatcaccatcatggtggttctggtaccatccggcatagccgtttactgcttgcgtgtgcaataggagccttgtttgcggctggtgcagcccacgcgcaaggcgagcgaggggcgaaacctcgtcccgaaccaccgattggcgttgccgaactggaggaccgcctcgctgcgcgttcagctgaaatcgatgccgatggtgacggttatatttcgttcgaagaactgcgcgcatggcgcgaggcccagagagaaaggcgtatgcgcgaacggtttgcacgtctggattctgacggcgatggccgcgtctccgtagccgaatttgaagcgcgccatcgagcgcgtattgctcgcctagatgcagatggggatggtgtggtgactcgtgaggaatttcgcgcacttcggggaaagcacggccgtatgcatcgcggtgaccgttga

SEQ ID NO: 984 - DNA, 735 bp, Artificial Sequence
  Synthetic Polynucleotide
atgcaccatcatcaccatcatggtggttctggtacgagcgccatttcttcgagtacatccagctatacttcatgggcaaccaccacgaccactgcgcgccgacctgatagttcacgtcttagcgaggacttattttcggctctcgatacctcttcgaaaggatacctggaacaagcggacttcgaatccgcctttagtagcctgagcatcgatgattctgacgcagcgagcgccgaagaggttttcaaggcgttggatgctgattctgatggcaaactgacccaggacgaaatgtcatcctcgctacagaaactggctgacgagttggatagccaatttcatcagatgcgtatggaacagggtggcatgggggcgatgggtggcatgccgccacccccgccgccagcaggggaagacgagggttatacggccgatgagctgagtagtatggcctcagaaataggctccacagattcaaaaatgtccggactcatgtcttctattgctgaaaattttgatgaagcggacgcgaacggcgacgggagggtcacggccagcgaagcacgggcatacgacgaatcacaaaacaccagcgctacctccgccaccgatggtagctctagctcagcgtcgagtgattctctagtgttaaaacgcatcatggagctggcagcgtcctatggtgattctagcttcagcagcacggcgagctcgctactgtcggtgactgcctag

SEQ ID NO: 985 - DNA, 561 bp, Artificial Sequence
  Synthetic Polynucleotide
atgcaccatcatcaccatcatggtggttctggtctccaaggcgccgacgcgccaactcacggaggttacgtaatgaaaatgaagttgattgctgcaacagcggtcctgatcgccattcccgcggtggcattagcacatggcgatggggagcgtaaaggtcgccatcacgggcatggcgaaaaacgagttgaacggctggataccgacaaagatggtaacatctcggcggaagaggctcgtgccgcaggcgcgaaacgcttttcaatgatagacgctaatggcgatggtgtgattacccctgatgaggccccgcagatgttcgaacgcccggatgccaacggtgacggccagatcacggcggatgaactggcagccgtttctgccgcgcgtgtgatgagagctgacgcgaatggcgatggggtcgtaacgaaggaagaacgtcaggctgcacacgaggcgatgaaagataagcgcaaagcaatgcgtgacaaacgcaaagcggaaagagaagccgcgccggctgaggcccctgcggaaaccccagcgccggccaccccctaa

SEQ ID NO: 986 - DNA, 348 bp, Artificial Sequence
  Synthetic Polynucleotide
atgcaccatcatcaccatcatggtggttctggtaagaatattatgacgatcttgtttacagggtctgctttcctcgtgtttttaataaccggccttgtatttgcgcaaccaggattctcagatgccgactccaacgcagatggtgtcctatcgatcgaggaagcgcgagccgcactgccggacgttcccattgaagataacaatggtgatggcattgttaacctgggtgaagcggagcgtgccgtgccggggctgcaactgagccctgacggccgcggcgatccggatgcaccagtgggtcaggctgaataccaggcgctggctagtgcgatcgaagagcagcgctga

SEQ ID NO: 987 - DNA, 435 bp, Artificial Sequence
  Synthetic Polynucleotide
atgcaccatcatcaccatcatggtggttctggttttgacaaagatagtgatgggataatcagccttgaagagttcggtgcggcaatgaacgctttgggcctcacccctactaaggaagaactggagattctactggcctcagtagatacggacgcgaatggcgtgattgactttggagaatttgttgatgtcatgtcggcccatttatggggtgcaggcgaaggtccctccgcggaagatgagctcaaagaagccttccaagtgtttgataaagatgggaacggattcatctctaaggaggaattaaaagcggccctgctgaatcttggcgaacagctggacgacgatgaactggaggcgatgatcaaagcagctgacaaggatggtaacggcgaaattgattatgaggaatttattcagatgatgaaatcatga

SEQ ID NO: 988 - DNA, 1158 bp, Artificial Sequence
  Synthetic Polynucleotide
atgcaccatcatcaccatcatggtggttctggtccctaccaccggctggcgccgcatcgcgctttggtctgtgtgtgcgcagccgcggaaggacagcctgccggtcgtgatggccgatttcgccgtttagacagaaacagggatggtaaaatcactcgcgacgaggttccaccggaacgccaaccacttttcgaacgtctcgatgcagatggggatggcgcgataagttcggaggaacatcgtgcttttcgtgaaaatcagcaacgtcgcccgccggcaggccgaccctcaccgccggagccagacttcgcgaacgtagcctatggtcctcacccgcgccaggtgtttgatctgtggcggcccgccgcgaatgctgctgccggaaagccgtctccactgctggttttctatcatggcgggggttttcgtggcggtgacaaaagccgcattagcctatccttactccgacagctgcgtgaaaacggtgtagcggtcgcagcggccaattaccggttgaccgacacagccccttttccggcgccgatgcacgatgccgcacgggccctgcaattcattcgcctgcatgctgatgagtatggcattgatcctgcgcgcgtggcggctaccggtggctctgcgggcgccgggatcagcctatggcttgctttccatgacgatctggcagacccggcagcagaagatccagtggcgcgtcagtcgacgaggctggcggcggccttaggcacggctgcgcagaccacttacgacccgcgtgaacacttgagaatctttaactcaacagaactggaagacgcaatgttcgcattttatggaatggagagtgttgaacaacttgccgaaccgcgtttccaggccctgtttgaggaagcgtccccgattaatcatgcaacccccgatgatccgcctgtcatgcttgcgtactcacagcctaacacggaattgcctcctaatccgcccggtaaactgtatatccatcacccgaaatttggctttctgctcaaggaaaaattagacggaatcggccttgaatgcgtgctgaaactgcgcgaagattacccggaaaacgggcagaatcaagccgttcaggatcaggtgcgcttcttgtgtgagaagttaggggtagcgctgccagagtga

SEQ ID NO: 989 - DNA, 942 bp, Artificial Sequence
  Synthetic Polynucleotide
atgcaccatcatcaccatcatggtggttctggtcaagcaaagcttgtagccgtgctcgtcgtgggtgctgcggcggcagccgttggcggggcggtttttgctttcggaggttccaaatcaccggagccccaggccatgccagtgccggtccctccggcgccacagccggttcctgtggaaacggcgatgccggtaagtccctttgattcgagcccgtctctgaacgacatgatgagccgattcggcggcggtcggggagattttggcgattgggaagctaggctgcaacagtttgactggggtgagttccagcgcttgtcaccggaagaacgtcgtgcacgcatgcaggccatccgcgcagaaattgaggcacaaatggatactaatggggacggtgtcgtcgatgaagatgaacgtttagatgctatgctggcgtctcctatgggccgtcgcatactggagagatttgactcgaacggggacggaattttggatgaagccgaacgccaggcgatgcgtgaggaagaggcgcgtcgccgtgctgaacaagaggcccgcatgttagaacgctgggaccgagatggcgatggcgttctgagcagacaggaacgtcgggcaatggaacaagatcagcgcagacggcaagaagaacagatgcgtaggatggcggcggagttcgaccaggatggtgacggtgaacttaatgcagacgagcaggcccgcgcttggcagatcacacgcgaacgtcgtgagattgatgcttttgtgcgccgttacgattccaacggtgatggtcgcattaataccaccgatctgaacgcgtttttgcaactttatcaagccggcgatcgtcgcgccgacgtgaataacgacggcgtggtggatgccctagacgtaacggctttcagagatatgatgaatcgcagtgcgaaccgtccctag

SEQ ID NO: 990 - DNA, 684 bp, Artificial Sequence
  Synthetic Polynucleotide
atgcaccatcatcaccatcatggtggttctggtccgatggaagtgaacgagttccagggggacgccttagaagagttttacgtaaaaaggcgcccccttatgaagataatgtttctgttcgctatcatttttctcttcgttgcatccggcgcggcgttggccgcagatgctgtcaaatctccagccgtggcgaaatcagcgtattcgcggatggatacggatggaaatgcagtcctgactgttacagaacacgccgcgttttggcaaggtcgttttaaagacattgacgcggatgatgatggcaagctagtactgaacgaatttcatgctgcaacccgcgaatttttcggtagtatggataaagacggcgacggagcactgatcgcgaaagagtatttcgctttctggtgtggtcctaaagctctgaatccggcgccggtggccggcaagccacagcgaaaaattgatgccaacggcgatgggatcattgacgatgacgaatgcgtggcgttttgggctgcaaatttttacgatgtggatcaaaacgcagatggtaaaatcacgctggacgaatttatggcagccatgacccgtcgcttcagacagattgatcagaaccgcgatggtttcatcagcattgaggaacatgcctattttatgaagggtggcgacgcgcgtaaatga

SEQ ID NO: 991 - DNA, 684 bp, Artificial Sequence
  Synthetic Polynucleotide
atgcaccatcatcaccatcatggtggttctggtcctatggaggttaacgaatttcaaggagatgcactcgaagaattttacgtgaagcgtcggccccttatgaaaaagatgttcttgttcgctatcatttttctgtttgtcgcctccggggcggcgttagccgctgacgcggtaaaatcaccggcagtggcgaaaagcgcatatagtcgcatggataccgacggtaatgccgttctgacggtcacagagcatgcggccttctggcagggccgcttcaaagatatagacgcggatgatgacggtaaactggtgctgaacgaatttcacgcagcgactcgtgagtttttcggctctatggataaagacggagatggtgcgctaattgctaaagaatattttgccttctggtgtggcccgaaggcgctgaatccagccccggtggctggtaaaccccagaggaagatcgatgccaacggcgacgggattattgatgacgatgaatgcgttgcattttgggcggccaatttttacgatgtagaccaaaacgctgatggcaaaatcacccttgatgagttcatggcggcaatgacgcgccgttttcgacagattgatcagaaccgtgatggctttatctcgattgaagaacatgcatattttatgaaaggcggagacgccagaaaataa

SEQ ID NO: 992 - DNA, 675 bp, Artificial Sequence
  Synthetic Polynucleotide
atgcaccatcatcaccatcatggtggttctggtccacgtcgcgcatttgtattcgcgggactggtgctcagtacgaccgccttggctgatgtccatgactttcctagcgcggattcagatgttgtggcatcggttggtttcatcgacgccgagcgagtcggctttttctggacatccgtgaggggcgaccgggtgcgcgaaacccttgcagatgcggcgccccaagtcacgggggccatatttgatttcgaaattcgtgataacgctttacgtgaaactctgtcgtgggcattgctgattaatggtgtagaggtagcgacctttcaggttccgccgggtctgtctggcccgcagcagatcgatgttacttttccggccattgcggcggccgggggcggttatgaagtgagttttgaagcccgcaacgtcattagcggaggcgctggatcacacacgctagtatacgctggggcgggccctcatcaaatcgaactgattggggaggcatgtgcagccgacatcgacggtgacggccagctgacccttttcgatttcttagaatttcaaaatctgtttgcagcgggtgatctccgggctgattttgacggtgacggctcgctgactctgttcgatttcctggaatttcagaacgcatttgcggccggttgcgagtaa

SEQ ID NO: 993 - DNA, 492 bp, Artificial Sequence
  Synthetic Polynucleotide
atgcaccatcatcaccatcatggtggttctggtcgatccttaggtcagaacccaacggaagcggagttgcaagacatgatcaatgaagtagatgccgatggaaacggcaccattgattttccggaatttcttactatgatggcacgtaagatgaaagacaccgattcagaggaagagatacgcgaagctttccgtgtgttcgacaaagatgggaatggttacattagcgcagcggaactccggcacgttatgacaaacctgggcgaaaaactaacggatgaagaggtcgatgaaatgatccgcgaagccgacattgacggcgatggtcaggtgaactatgaagggaaatctctgcattgtcatagttgcatcctttgctttaccatacgtagctatcctttcaagcgctcgaccgcgctgcaaacgaggattaaaccctttctggttactatctttggaacaattgtggagcagttcgagaaactgttgtga

SEQ ID NO: 994 - DNA, 777 bp, Artificial Sequence
  Synthetic Polynucleotide
atgcaccatcatcaccatcatggtggttctggtccgcgtacccgaattggatattcggtgcttcgcacgcattcccggcgtactcgcatgaagcacgcgcaaatcagcgccgcagtctttgctgcgctagccctctctgctgcgggcctggcagttgcacagcccgccgaaaaccgtcgcgtacaggcccaagtggatcgtctgatggcgaatgacaggaacggtgatgggaaattatcacgcgacgagttgcctgcgcggctggctgatcgtctgttcgcggaagccgacacagatgatgacggcctgctgacccgcgaagaggttacggcccatgtcatgggtgctcgaccagcgggtgaagatgcaaccccggcgcagactgcgcagccgggcgcggggcctgaaagtggccaccaagcatttgagggcgcgatgaaacaggcgggggcaagcatgagagctctgcgtcgtagtcaattcgccgccagcacacgagactctgatctggacgcagcccagtcaatgcaggaagctatgatagccgcgaaagcttcctttggatctgttgcaatgagcgccgcggctcgcgcacgcttcggtgaggatcaagacgcctaccgccgtgcttttcgcctcgcaattatcgaatccttgcgtgcagcgatcgaccttgaacaggcggtgctagaagaggatcagccgaaagcacaggcggcccaagcgcgtttaatgaccacgcagaagaccgcccatgatctgttccaggatgagtag

SEQ ID NO: 995 - DNA, 1539 bp, Artificial Sequence
  Synthetic Polynucleotide
atgcaccatcatcaccatcatggtggttctggttcaaaaagaacgaatctctgtgcttgggccagccgggtcggtttagtgggagtacttggcgttgcgatgcccttcgcaggcggtgcgttggcccaaccttgcgacccgaccatgctggtggcggagcatcagcgttttgctgccgggactaccccgctggatgcagcgctgggggattttgacggtaacggcatcattgatctggcaatagtcaaccagcagtcggacgatgtttccgtgcgcctaggcctgggcggtggtacattcggcccagaacaacgctttgcagtcggagatagcccgcgtgatattgcgacggcggacctgaatggagatgggcacgcggacctggtgaccgccaaccagtctagtatggatgcctcggttttactcggccgtggtgacggtacttttgaacccgctcgttctatcagtacccaagccaatggcttcggtgtagctttggcagatctggatggtgatggcgatattgacctcgcgttaacaaactccggtggaggcatgtctgtgctgttaggggccggagacggcactttcggtgcgccgacgacctatccagggggcaccgggagctggtccatcgtccttggcgatctgaatctcgacggtgtgccggacgttgcatttacgaactcaacaagcgatgatgtttcggttcgactgggccttggggatggtggcatggggcctgaaacccgcctgccggccggcgatacgcctcgcggggtagcactggcggatgtgaatggtgacggtcatccggatattataaccgcgaacacaaacgacagtaacgcctccgtgttgatcggccgtggagatggcaccttcgagccacagcagacgtttgctgcgggacgcggaccgtgggaagtcgcaactgctgatttaaatggcgacggccacgccgatattgcggcggccgacagcgccgatggcgcactgacagtgttactaggcgtcggtgatggtacctttcaggcaccgctgagctttcccaccgccggcatccatcgtgggattgtattgggagatgtgaacggagacggtggtactgatgctgttgcttgcaccgtgggcggctccggtgctgttatagtattgcttaatagatgtgtcgcgctgccacgcttcaccctgcaaccgttaggcattgcgattgacccaggccaatcggctctgctggaagcacttgccgtgggcacgaccccgcttttttaccagtggcgcaggaatggagtcgacttggcagacggtggcccgtttagtggtgctacaacgccaactctgaccatcgagcctacaacgaccgcgctgtcagacacgtatgatgttgttgccacgaacgcgttcggacagaccgccagcacgccggcggtagttgcggtgcgtgatacttgccccgcagatttcgatggcgacggccagctcaccctttttgactttctggcgtttcaaaatgcttttgcggtgggttgtccgtaa

SEQ ID NO: 996 - DNA, 1158 bp, Artificial Sequence
  Synthetic Polynucleotide
atgcaccatcatcaccatcatggtggttctggtgtagcggcttcgacaccagaacgcgcagccgaggtggcgaaatttaatgaagccttcaagaaagttcgactgaacagcgagcccttgtccaccagtgatattatcaacttatcacgtggtcttgcggacgtcatatctattgatagcctgccgcgggcactgctcttgaatatctgtcgttacatgcagattcgcccttttggcactgacgctttcatccgccgtcaaattaggagtaaaatgtcctctctgcaactggatgacgcgctaattgatcaggaaggagttgaaaacttaacctatgaagaactggtgaacgcctgccattcgcgtggcatccgctcgtttggggcagtgagcaaagcggagctgcaaaaagaactgcgactgtggctagatttgcacctgagaagcgaaatcccgcctgtcctcattattctttcacgcgcattaagcatgtatgagccgacggccgagacgaataaggccatacagcaggccattatggctcttccggaagacgtcgtggaagaagtttcttcgaccgcggaaaccgatggtaaatcctcaacagattaccagaaaaagattgagtcactggaaatgcaacaggaaatgatcgaccgcgagttggaggaaatcagtgaaaaagacactcagacgatcggcccaagcgatgtagctgatctgtcggacgcgctaagtaagctgtcgtctagctcaaaagaggatacctcccaacagatggatgaaatcaaatccctcaaaattgatgtcgcgcagttaaaggaggatttgtcgatgcagagcagcatgccggaggctgataaagcgctggaattggaaggtaaactggaaaatcttgttaacgacatcgaagcggagctgctcaaactgggggaccaagaagcaacccccattaaaatcagcaaatctaatgacgaggtaattacactggaagacctcgaagtgttactgcgtacgttacgtacgagcaacttctcggatgagaaaattgcacggctgtttcaggccctagaccgcgataacgatggtcgaatccgcgtcaaggacattatggaactgggcaatctcatagaaaaacagcggtcttccctgaactga

SEQ ID NO: 997 - DNA, 1212 bp, Artificial Sequence
  Synthetic Polynucleotide
atgcaccatcatcaccatcatggtggttctggtgaaaatgttgtctacttggacaactcggccaccactcaagtagatccggaggtgatcgctgcgatggttgaaatgatggaaaaagagtatggtaacccctcctctctgcacagaatgggcatggcagtggaaaagcggatgaataaagcacgcgaacaggtggccaaagtcctgggggctaagtcaaaagagattatattcacgagcggcggaaccgaagcgaacaatcttgcgatccgtggtgcggcccatcagtatagcggccgtggtaaacatctcattacaaccacgattgaacaccctagtgtattacatacctttcaacgactggagaaagaaggctttactatcacctacctgaaggtcgatcgcaacggcttcattgacttagaagagttgaaagctgccattacgaaagaaacgatcctggtttcaataatgcacgtgaataacgaactgggatctgtgcagccgatccaggaaattggtacactaatcaaggcggtcgatcgccgtattctctttcatgttgatgcgattcaaagctttgggaaactgccgatccatccactacgaatgaaaattgatctgctcagtgtatccggtcacaaaatacacgggccgaaaggcgtgggtgcgctgtatatcaatgaaaaagtacgtgtacatccattgattgaagggggcggccaggagcgggacattaggtcgggcacagaaaacatccccggtatcgtgggtcttggcgtcgcagccgagctgattgaaaaagatcgccttatgaagggtaaagagctggcagaacgcaagatctggttcctacaagaggttcagaaacgtattagcgatctgaagatcaacggaccggtgagcggccaggaagttgaagccggggtttcagcacctcacattattaacttaagttttcctggactgaaaggcgaagtgttgttgcataccctggaagacagacagatctacgtgtctactggctccgcttgtcattcgaggcagtctggtccttcccacgttcttcaggcgatccatctgaccccgcgtgaactcgaaagcgcgctgcgcttcagcctgtcatatcatacgaccaaagaagagctcgcgtacgtcttagaggtcctccccgggttagtagaggaactgcgtaccctgatgcaacgctga

SEQ ID NO: 998 - DNA, 528 bp, Artificial Sequence
  Synthetic Polynucleotide
atgcaccatcatcaccatcatggtggttctggtcatgcagctcgcagtcaggcgttaaaacaaccggagtttggatggtcagcctgcctggcgatttccgcccgtgcgggtcacaagccccattgtagcttgatgaaacacacactcccacggtaccttctggctggcctgtgtgcacttgccttctcgtttgtctctgcgactgcgttcgcacagggcggggccgataaaaagccgaaagaaccttcaaaagccgacctgaaaaaatatgatgcaaatgctgacggtgttctggatgacgcagaactggcgaccatgaaggcggataaagatgctaaaaaagccggcgataagcaagcgcgactggataaatatgacaaaaacaaagacggtaagatcgataaacaggaagccgaggccgaaaaggccgataaagaagcagcgaaagcggccaaagcggaaaagaaaatgaaagatgacgcgaaaaaagcggatcgtgctaaggagaaaagcaaaagcaaaaactaa

SEQ ID NO: 999 - DNA, 474 bp, Artificial Sequence
  Synthetic Polynucleotide
atgcaccatcatcaccatcatggtggttctggtcgcaatcgatcaatgttactgactacggccgcgctcgtcgtattctgggctaccttgcacacaccagcaagcgcgcatggtctgcaaattgatgccgaccaggatggcgtggttaccgtgacggagtttcaggcggcatttcctgaatatgccgctaaccccgacatcaacgaagatggagtcgttgatcgggaagagatgcatgcggcccgtaccgaaatgggggacaccggcggcgcacgtcaacgcaagggtggttccgatactgcgaaagccagtcgttcgggtgactgctctggagatggcagcgggtcgggcggcaaaggtggtagcggtggcgggaaaggcggttcaggcggtaatgggaacggacatggaggcggtgggcagggcggccacggaggtggtaatggccacggcggcagaggcggccggtcttaa

SEQ ID NO: 1000 - DNA, 660 bp, Artificial Sequence
  Synthetic Polynucleotide
atgcaccatcatcaccatcatggtggttctggtaatacatcgaagttaattgacgtcctaccacctaccgtaatggcggaactccaagcagtgatcacgcgattccagataaacactccgcggcgtttggcccactttctggctcagtgcggtcatgagtctgggggatttaaacgcgttactgaaaaccttaattactcagatccggtgcgtatttgtcaaatcttccgcaaatttgataaagataaggaccgtgttattgatcccgaggaaattcagtatgcgcgcggcttcatccagaacccggaaaaactggccaattatgcttacgcaaaccgcatgggtaatggcagtccagaaagcggcgacggttatcgattttgcggtagggggtatatccagctgaccgggcgtgataactacacggcgttcaataaatttgtcgccgacgatattatagctaccccgcgtttagtggcgaccaaataccctctgttttccgcaggctggttctggcatacaaaccgcctgaacgcggtagccgacacgggtacggtcgagcaggttacccgtcgggtgaatggcggcacccacggtttggcggatcgcaccgctcgctttaatcgactgttgccgctgctcactccagcacaagcgtag

SEQ ID NO: 1001 - DNA, 1146 bp, Artificial Sequence
  Synthetic Polynucleotide
atgcaccatcatcaccatcatggtggttctggtaaccgaaccaaatccgatgctggtgcgcagcccttaacaccacgtcaacctggaggggcagccgtgggctgggctcagggtgagggccgcgcggtacacggcctagtcacgtcgcgtagcggttttaggggcgaacgcgcagcggacgatgccctggcgcgtgcacttcggcaactgcatccgttcctggccattcggtttctcttggccctggcgctggcgtctgttcgcggcgctcgcgctatcgttctggccggactcggggatgcagtggcattattgcgtctggtcctgcgaggtataggtcgtgaatcacgcggctgcgaaaatcatggcactgacggtcgtcgcgagaacaggcgtttacgcgtgcaccgcagtagcccgagttcccagtgggttagcgggcagcgggcggatcgcgcgaccccagtaccgattgcacgtgccgccaagaatcaacgcttcgcagcggtggcatcggaaatgaaaaaagcggggcataacgctttacgtcacgcggctgccgacgggggatctccgcagcgtgccggcggagaatcagcgaagaacgctggccctgggtcgtgtacgggggatccgccgcagctgcggccgtgccctcagcgccgtcccccgatgaaatcagccgccatcccacttctgagcctcctgttaattaccgcaggtacctcggcgatggcggctgatagtatggcttcctttgcaacaggtggctacgccaatcaactgcgcactccggagatgatgcataaaatcgacacgaacaaagacggcatggtatctaaggccgaatgggatgcgtatcagcagaaacttttcgcgatgatggatgcggatgcctctggtgcgctggacaataaagaatttatgcaagcacacagagatgacgtcgctagcttcgctaccggcggttttagcaccgccttgcggactagcgaaatgttcgcaaaacttgatacggatcatgatggtaaagtgtcccgtgaggagtttgccgcgtatcagtccaagctttttgatatgatggatacaggtaaaacgcgcatgctgggccaaaatgaattttttggccgcggtcccgcccattaa

SEQ ID NO: 1002 - DNA, 1233 bp, Artificial Sequence
  Synthetic Polynucleotide
atgcaccatcatcaccatcatggtggttctggtgcaaagtttttacaggacgccgtggaagagatgagcgctactgggctcgcgtctcctgcggccaaagaatttgcggaattgtacaaaaaagcacggatcacaggcgaggcactgaccatggccgaactggagagggtctgtcactcccttaaagattcgttgaccattgataatctggaccgcgcgcaactggtaagtttatgcaagtatatggatgttaaagctttcggaacggacgccttcctgcgttatcaggtgcgaaaagcgcttactaacatttaccgtgatgatgaagaaatactaaaagaaggtgttgattcactgtatacccaagagctggaaaacgcgtgccgcatcagaggccttttttacccaggcattaatgcaagtgcaatgcgccgggaattgaacctgtggctggacctccatctgaagcgcggtatcccgagcgtccttctcattctgagccgtgccttaacgccgaatatgtctctgctccgtcccgaggaggccttgaaagataccattctctcgctgccggacgctgtggtgaacgaagcggaactgcatcagcgtgagctgggtggctcgggggcggtaagctataaaaagaaattggaagttcttgaacagcagcaagatctgatcgccgaggaattggcgcaagaacgcgagtccaaaaaactaacggctaacgatgaacagataacaaaggacgatctaaaaactattagcgacaccatccaggttctgtctagtgaaaatccagtagagttagaagaacagcaactggcggaactgaaggctgacatgtcagaatttaaaagcgatgccgagaaattagagagcctaaccaataacaaattgaaggaaccgaaagcttctgaaattatcggcgaacgccttggtaaaatggtcggcgaaattgaagcggaattactgtccctccaggacaaggtgggagatcgtttgaaactgctttgtcctgatcgagatggcagtctaacggtcgaccaattagaacgtgtgttccagctgatcagagatgaccccgcagagtcagagcgcctgcaaaacattattcagtcctttgataccgacaaagatggtaaaatcctgattagtgatattctcaaaatggctgaactggcagaagaacgtgaggggcagggacggctggtcagcaagaatgagccttag

SEQ ID NO: 1003 - DNA, 573 bp, Artificial Sequence
  Synthetic Polynucleotide
atgcaccatcatcaccatcatggtggttctggtcgaaaccacgtactggtgctcactgcttccgcagtcattcttgcgtgtggagttgccgcgtctgcacaagcgcccggcgctcaggggccgggtcctcagcagaatccgaccatccagtcaattccaggcggtccgatgatgcaacaacaggaccaaacaatacgcgaacgcctacgggagcagctgcaagaacgtgttcagcgtggcgaagaggaagatagcgatcaggacggttatcattaccgcgggggcatgatgggtgggggaatgatggataggggcatgatgggtcgtggctatggataccatgatggcgaccgtggtggtatgcggcctggaatgtggggcccgccaatgatgatgcgcatgattttttcgctgatggatgccgatggcgacgggaaattgagtctgcaagaatttcaggccgcccacgaacgcatcttcaaggctatggatgcgaacaaagatggccggttaacgccagaggaaatgcagagcttcatgcaaggtgcgcgtcgttcggcgcagccgcaatag

SEQ ID NO: 1004 - DNA, 351 bp, Artificial Sequence
  Synthetic Polynucleotide
atgcaccatcatcaccatcatggtggttctggtatgaaacatcatcaccaccaccacggtccgggtgcgtgcgtggacaccaacaacgatggttggtacgagggcgacgaatgcgcgatgcagatcttcgttaagaccctgaccggtaaaaccattaccctggaagtggaaccgagcgataccatcgagaacgttaaggcgaaaatccaagacaaggaaggcattccgccggatcagcaacgtctgatttttgcgggtaaacagctggaggacggccgtaccctgagcgattataacatccaaaaggaaagcaccctgcacctggtgctgcgtctgcgtggtggctgataa

SEQ ID NO: 1005 - DNA, 1863 bp, Artificial Sequence
  Synthetic Polynucleotide
atgcaccatcatcaccatcatggtggttctggtcacagctcttgctccacacgttatgccggaatcttaggcctgttgcttgcacccgtagttttcctcgcggctatttcaggtgcgtcggagcgagccggggtgccaactgaaaacggtgctgacaccccggaacctctgagcgatccgatactggagcggattaccccggcgggcctgaatgcaggccttgaaatcgtcgccagtggtctggtggcgcctatcggaattgtttttccggatgatggcacgggccgtatgtttgtagcagaacaaaccggtgtgatttgggtatacccagcgagcggcggacgccgcatgctactagacgtctcggagcgcctggttccgttggggatcggtggtccgggctccttcgatgaacgtggcttactgggctttgctctgcatccagactttgccgtgaacggtcggctctatacgtacacttcagaacccttcggggatgccagtgattttccgattgcggaccgatctgatcccaatgcacatcagagcgtggtggcagagtgggggattgccgcggataacccggaacgcgtcgatccggccagtcgtcgtgaactgctgcgccttgaccagccacaattcaaccacaatggcggtgcacttcgttttggtcctgatggatatctctatatcgggttgggggacggcggaggcagggatgacgaaggtccggcacatggacctgacggcaatggtcaggatctgaacaccgttctgggcagtttgctacgcatagatgtagatatcgacgaaggcgatttgttatcagcgaatggtcgctacgcgattccgccagataacccgtttgtggaggccggcatagcagaaatgttcgcgtttggtttccgtaatccttgttcgtttagctttgacagcgctgatggcgctttatatgtcgcggacgtgggacagggggatattgaagaggttaacagagttgaagctggcggtaactacgggtggcgcgtaaaggaaggaaccttcttctttcagaataatggcgatgaagcgggcttcgtcacggctacgcccgctgccggtcaatccggtgatggcctggttgaccccattgcgcagtacgatcatgacgagggcctgtcgattataggcggttttgtatatagagggacagcgttaccagattttgatggcctgtatatcaccggagacttcggtacttctttcggcaccccgtctggtcgactgtttctggtggatgcaaacaacacattctttgaaatccttatcggtgagggtggggccgcgtatccgtactttgtgaaaaactttggacaagatcgtagcggagaagtgtacgtcctcgccagccagaatgcggccccctcaggcaatagtggcgtcgttcacaaactggtaccggtcggcactggtaccactgatgacgaacgtgcgatcgccgcggttctactggcacaattcatgctggcagattccgacggcagcggagctttgtctattgccgaggcacaggggctggtgggtgaactgccggcaacggtgtacgcgaatctcgacttgaactcgaacggcgcggtcacccgggtggaactggaggccgttgtggacgggtccggcggtgaaggagaaggcgaaggtgaaggggagggcgaaggcgagggtgaaggcgaaggcgagggcgagggtgaaaaagggccattaccggcctgcaacgctggtacgggcggagggacgggtacaccatggggcgcttggcttctggtggccgtcatggttgggtacttactattccacactcggccgggcgcgagcagtgaacgttga

SEQ ID NO: 1006 - DNA, 2337 bp, Artificial Sequence
  Synthetic Polynucleotide
atgcaccatcatcaccatcatggtggttctggtcctggaagcccgatccgctctagtattgtggcacgatccttgggcatagtcgtagggctttcatgcgccgcttgggcgattgccgtgccacccccgagccaagacggtggccgtcacgatcagggcccgtcgactccgtcaggtcccgcgggtggggaggtttatccagcacataatgttgtgctcaagagtcgcgtccctctgcaaaccttcaacatgggcgatggtgccgactgttgggggtacacgagcccgtcgggccgtgaatatgcgatcatgacatttaccggaggtgtttcctttgtcgaagtaacggatcctggcgctccggaaatcgtgcagaacttccccaccaatggtacttctttatgggcggacgctaaagtgattggcgataaatgctactttattaaagatcgtctggataccggcctgcaagtttatgacctggccaacattgaccagggtgtcgtgacgaagataacggagtatcggggcttcggcatcgaatgggcacataatatcgcgacccacgcggaaagtaacacagtatacctttgtggcgcaaacgcgccgaccgatgccttggtcgctattgacgtcagcaatccagcttcgccgaatgttgttggaacttataccgatgtggggtacattcatgatgcccaggtagtgacgtggccgcatccaggaccgtggcagggccgcgtgatcgcgttttgctttgccgccgagcaagggattgacattgtcgatgtaacaaacccaagctcaacggtaagactggcacgtgtgggctacgttggactgagcttctcccaccagggttgggttgatgtggaaacccgcatgttgtatcagaacgacgaattagatgagattgatggtaatgtggctactaccaccacccgggtatttgatgtatctaacctggcgtctccgcaattcgttggcagctttagtacagggcttccgactatagaccacaatttatataccagggatggtttcgtgtaccaggcgaactatcagtcaggtatgcgtatcttcgatgtgagaaccagtccaacaaatccggtggaagtcggatggatcgatacctttccggctggcgatggcctgagttttgacggtgcctggtcggtctacccgtattttccctcgggtaacgtgctgatttccgacatcaaccgtgggctcttcgttgtagatccaacgttcgccttagttggcggcacccctgcggcattcgagtttgtcggagaacgcccgacggatgtgcctcagcgcggtgcgggtgtccgcgttcgtatcactggcgacaacggccgagctgtcgatcccgcgacggcaacgctgacgtatcatatccacccgcgccctggtagcgaccatagccatatgtatcacaccctaccactggagccgctcggcaacgatgaatacctggcaagcttcccgtttctgccgtgtggggaaatgattcatttttacttcagtatcacctcaacagatgggctcaccgttaattggcctttgtcagccccaattgagaaatttccggccgacgttgcagatcgtacaatagttgcgtttgaagacgacctagaaagcgatctgggctgggaagtgggcgatattactgacaccgcaactacgggcatctgggagcgagcggtgcctgtgccgaccacatttgcccccggttcggatgccagcgattctggagcatttgcgtttgtaactggcaatgggaccccgggcggttccaatggggccaacgatgtcgacggtggcgccacgaccctgacctctcctgtcattgatgcgagcgaagcgcgtggtcgcgtcgctgtcagtctctggttcaaaggccagaccttggatacgggggacggcctgtttgtcgaactgagtgcagataatggtgccacgtgggtgagagctgacactattgaagagccattagcgaattgggtacgccgtgaatatgcgctggaagcctttattccgcggtctgcacaaacacgtattcgcttcattgcggctgataggaatatcccatctttggttgaagctggtgtagatgacgtgttattcacgacaaaagtatgcgatccgctgcttgaaggggatgcaaacaacgacggcacagttgatttcgctgacctgaatgcagtgctagcctcttttggacagtccggtttcatgcccggcctgctctcgggggatgtcaacaacgatggagtagtggattttgcggatctcaatgccacgctggcgaactttggtaccagcaattga

SEQ ID NO: 1007 - DNA, 2493 bp, Artificial Sequence
  Synthetic Polynucleotide
atgcaccatcatcaccatcatggtggttctggtatacgcgccgtattgctggcaggattaattgcgtcaccctcggcggttcttgccagttcccctccgacactcagcgctgcgcgatttgtcccgggcgacgcttctatcgcagccgcgccaggtgtgcaacataagagcgccatctccaaaggtggcgatcagtacctggtggtatgggaggatcgtgcatcaaccattagcaacattgcctgggaacagacggaaagtgacatcgttgggattcgcctggatgcgagtggccaaccgatcgatgcgaccccgttcactatttctcgtaatctggggtatcagcgtcggcctgaggtcgtttggacgggtgaatcgtgggtggtggcttgggaaaaccagagccctaccgcggggtattacgaatcccgcataaccgcggctcgtgtgtctagcgacggcgaagtaatcggtgcaccgtttgagccattcccgacgaatggaggaaacgattttcacatggctagcaacggttcgacggtcgtttttgtcacacagtcacataatgcaggcgaaggcggcttactggcgcgccaaatgaatcccgacggttccttcgtgggtggcaccgtcattctagccccggagacttattttctgtatttcttcgttgatgtgcagtcagcaggcggtgaatacttgctaacctataacgcggacaccggccccgtagtacgccgtttttcgagtacgctggaaccaattggtggaccggtgagcatcccgggcagacgttttatcgcgtctaatgggtcgcaatacttgctggtctttgagggtggccagtttgggaacacccttctggcttctccgatgaacgtcgatggctcactcgtggttcccggtggaacaccactgcacgatcaattcaatggtgcaattttatccgttgatgccgcgtatagcgaaggtgtgtggtggctcgcctacaaagaggcttggaatggactgagctatcagaggatgactgacgccggggccctcctggatccggcattgctggtgtaccctggcgtctcaagagactgggtcgaagcgccgaaagtggcgccagcgaccgggggcggcgttgtgactgtatgggatgatagccggtcgattaacggcgtttggccctcagaaatttatacaggaaaagtatcttctccgcttagctttaccgaacctgacgtcctgtcgttagcagctccgtcacagatgtcccccgagatcgcggcgggcccgggccactaccttttaacattcgcaagtcagaccagcgcaggcgtccgcatcatggcccaacggattgcctccaatggtgcggcaatagatgaagagccgatcgaagtggcagctgtgaacacggtaggtgggagtccggcggttgcgtggaacggtgcatcctatctggtggtgtggagcgatgggttaaacattatggcacgacgtctgagcgaaactctggacctcttgggtgatggtcctctgacgctgatgccaggtagcactccagatgttagcgccctgggcgaaaattttctagtggctaccacttcgttcgccacctacccgcagttccgagatacctgggtccgcagggttagtggtgaaggggcattgatggatgcgggtcgcatctatgtaggcgggggctacgcccagtttagccgtgtggaaacttttgacgatcgttggctcgtatgctggcaaaacaattggacccatgactctcctaactcggatctggttgctcgcttcgtgggagcggacggtgttccgggcgcctctattggcgtggcgtcgacgagcggcgcctctggtcatcctgacatcgccgtgggaccggactatgcgttgttcgtatggcgccaaaatacattagctaacgccaacaatgatgtgatgtgtcgtcgtatccgcccggatggcacgtccccggatgcgggcaatgtcatggtcagtaacgcgccaggccgccagctgtttccggtggccacgtggacgggtgatgaatattttatggcttgggacgaccgtcgcaacgcagataccttcttcgatgcgcgtgatgatgtgtatggaagccgtattagcagtgcgggtgctgtcgtcgacccggcgggtgtcgctatttttagtgatgaccgcccagaaatcactccggccatagcgtcaatgggtaatggtcgttttctggtcgccgcctcagtattccgggacgaggttggccttcagggttaccgcattgctgtgcgtgccgggggaccgcagtgccctgcggatctcgatggggatggtgagatcggctttggcgacctgaaccttatcctgaccaatttcggtttaggcacgccaggggcggaaaccgtcattggcgacgtaaatggtgatggcgttgtcaactttactgatctgtctgaagctcttagtgcctatgggggcgggtgttga

SEQ ID NO: 1008 - DNA, 915 bp, Artificial Sequence
  Synthetic Polynucleotide
atgcaccatcatcaccatcatggtggttctggtcggcgccgatatcgttcgcgcgctggccgttttggagcggtatccgaccttacacccccacactgcattcgcaagcgttctccgatgaacctggccaatgtcttcgggctcgcagttttgagtttaccgtgtgcggtgctggcccaagaatacgcgtggatcaactttgagagcactagggcactggaagctaccgaatttgctagctcagccgtgcggatgcctgatagcctgcgcatagccgcggatgacttcttggttggtgagccggtccgtctgtctgaagtagtgttctattccgtatggatcgatccaccggtgattttaggtggcgattggtacatttatcagtacgatgaagcaacccgctcgcctggtgcgctagtcatgggggcctttgacgttagtctggagacgacggattcgggcctcgtgtccggcaattttggtaccatctatcgtaacgcgatggcagtggacgtggaacttgaaccgggtcgctacttcctgggcttccgtacgcatgttgcccctggagcgggaaaacccgtgaatgccccgcttcatccggagtggagtaacggtgatgctaccgcgcagtggaacttttcagctctgacaagtggcgaagttttcgaagcgtggatgcccatgactgactttcacccgaccctgaaagaatgggcgttcgaactgcacggcaccagccgaacttgtcgggcagatattgatggggacggtagcttgacgctatttgatttcttggagtttcagaatttgtttgcctcatcggacttacgcgcggactttgatggcgacgggagtctgacactgttcgatttcctggaatttcaaaacgcatttgcagctggttgcgaataa

SEQ ID NO: 1009 - DNA, 1377 bp, Artificial Sequence
  Synthetic Polynucleotide
atgcaccatcatcaccatcatggtggttctggtgtggcaccacaagtccgtcaggttcctggggaagccgacccggagaaaaagatagcgaaccccactccgatgtataaaaccttcccattaccgcgcaaaagaattatcattgtatgtttgctcacggctcttatcggtctgaccggaaaggaaattcgagcggtggattttctgccgacaagtgtagaggtccaggttgcctgcggcgatggcctggctgaatacggttccgcagaaatctgtgacccgggcaatcccctgcaaggtattaaaccagatgttgggacgaccacctgtcagatgtataacgatttgtttggcaatcctttccagtcaggttcgatggattgcctggaagactgctctgattttaacccgcattactgcttcacatgtggcaatggatataaagaactacgcgaggcgtgcgacaaaagcgattttggtggtcggacttgcatcagctttggcttctcgggtggctcactctactgcacgccggtgtgtcaaatttccaccgcgaactgtattgccatggacagcgaaggaggcgtgccgggagggggcggcagttcgggtggcagcagcggttctacctttgggtattcgccgggtgcagatacacagaaagagacgaaggtagttatcaaaggcaagagctatcccaatagtgacgtgcacatactgttggatggcgccgtggtagggatcgtgcgtgccgacgcgaaagcggatttctactttgaatctgctgagatttcacctggtgtggcatccttcggtttttggtcggaagataaagacgggctgaaatccaccttactgacgctgaccttgcgcgtgactcgcggggcggtcacgaccgttaccggcgtctatatcgcccctagcattgacgtagataagaaatcagttcgtcagggcgaggatatcaggatttttggccaaacggtgccggatactacagtgaaagtccatatacacagcgagaatcagttcgtcgaagaagcgagcagtggtcccggaggtgactgggagattgtttttaacacccagcctctggaagaagctttccatacagccaaagcagcatttgaagtcgaagtgggcggcaacttaatcaagtcgggtttcagtcgttccgtttctttcgcgattgcgcgccttggcggtgaagctgtgtgtcttgaggcagacttaaacggcgataaacgtgtaaacctgacggattttagcatcctactgtaccactggggtagttcaaatgcctgcgccgatcaaaaccaaaatggtgtcgtcgatctgattgatttcagcatcatgatgtactattggacgggctaa

SEQ ID NO: 1010 - DNA, 624 bp, Artificial Sequence
  Synthetic Polynucleotide
atgcaccatcatcaccatcatggtggttctggtccacgttctgtggaacaactggagcagattagaaagcagaaaaaagcacacatacgacaaaccgctttagaattgttcgccgaaaatggatttcatgcgacgagcatcagtcagatttcaaaaaaggcgaaaatctcgaaaggtcttatttataactactttcagtccaaagatgagatcctcgaagacattttcgattgggccatcactacagtctatagcaactttgatctgaataaagacggcatgctgtcgaccgaggaatttattcatttcatacgcgttagtctgcggacgaccatggaaaaccgtcctttctggaagctctactctgcattagtattgcagccccacatcctggaaacttacaccgcgaaatatgaagacatgggcaaggagattgctgggatgattcgtaattttatcgtgtcccaaggttcagttagcccggataaagatctgttcgcgatcagctgcctgcttaaaggcgccaacctaattctcatcacagcaccggattttttcccggtcgagaacttagaaaaagacacgatcgaagcgtgttttaagctgatttccaaaaatgaataa

SEQ ID NO: 1011 - DNA, 1293 bp, Artificial Sequence
  Synthetic Polynucleotide
atgcaccatcatcaccatcatggtggttctggtccgaagggtgtgcgccaggatgaatttatgcttttcgcgctactggttctgacagggatgttattggtcttttcgggagctcggcaaggtcaggcagtagagtatctgcctaccagcgtggaagttgtactgagttgcggcgacggcctccgtgaaggtctggagttctgtgatccaggagaaccgggcattttgcccccagacactggcacgaccacgtgctctcagtttccggatatcttcgggaatccctttacctccggtgtcttagggtgtaccgtggactgctcagcctacctggatgatacatgttatacttgcggtaacggccataaagaacaagaagaggagtgtgatggcgcggactttggcggtagaacctgcattacgtacgggttcacgggaggcactttagtgtgtaccgccggttgccacatcagcctggcgctctgtgtggcaccggacgaagaagggggcgtttccggcagtggttcaggcggtgggagcccgtcgggcggtttcagccctggtatgaaaacggaactagctaccaaagtggttatgcgcggaaaagcatatcctgatgcggatgtacatatactgattgatggaatcacggcgggcattgttcgtgctgactctaaagccgatttttactttgagacaactgaagtcaccccgggcgtcgcgagcttcgggttttggtccgaggataaggaaggactgaaaagtaccctccttacactgacattcagggtcatctccggtgccgtaaccacgatttcaggtgtgtatatcgcaccgtcaattgacgtagataaaaagtcggtggttcagggcgaacaggtgaccgtctttggccaaacagttccgcagaccgaggtgcacgtgcatattaacagtgaacaagagtttatcgaacaggtttcctcgtctgactcgggcaattggtcactgcttttcaacactgaagtgttggaagaggacttccacacagccaaagctctattccagtttgaaactgaaggtaatgcgataaaaagcggcttcagcaagtccgtaagctttcatgttggtcgtattggaggtgaagcggcatgtcccaacgccgatctgaacaaagatggatctgtcaatttgaccgattttagcatcttgctctttaactggggcacgaacaatgcttgcgcagaccagaaccaaaatggtaccgtggatctgatcgattttagtattctgctgtactattggacgggctag

SEQ ID NO: 1012 - DNA, 681 bp, Artificial Sequence
  Synthetic Polynucleotide
atgcaccatcatcaccatcatggtggttctggttggaaagctggcctcttggcagccgcgctaacgatcggatttgcgggtgccgcgggggcacatcctcacgtcttcgtagagagccgcgcagaagttgtgtttgatgacgcgggcaggttatctgccgtgcgacatgtgtggcagttcgatgaagcttttactgctttcgcggttcaaggtcttgacgaaaatggggatggtgagctgagtcgcgaagagctgcaaccgctggctgaagtcaacgtcgaatccctggccgaatacgattttttcacctttctccaccataacggcacagatattgccttcgagccaccccgtgaatattggttggacttttatggtggccggctgaccttatttttcacgctgccgctgcgtgaaccgagagttgtagatgcgtcgaccgtggagcttgacgtgttcgacccggcgtactttgttgcatttgaaatgacgcctgaaaccccattcgccctggtaggagcaccgcagacctgcactcttgattttacgcccccaccggctctggacccgcagacagcgaccgtcctggctgccattccccagtcagaacgccaattgccgagcgatctgatgcagataaccgaaaccctgtccaatagcgcgcgtatcggctgtaagtag

SEQ ID NO: 1013 - DNA, 2148 bp, Artificial Sequence
  Synthetic Polynucleotide
atgcaccatcatcaccatcatggtggttctggtaatcggccgatttcacgcagtagcttaggagctgccgcattgtcgcttgttgcgggtggggcgttcgcactcgacgaggtacctgaatttgccgcggtgaacatcggcgctatgatagatccgtctgccctgtcctttgcgcgagccgtcagcgaagatggtgacgtggttggcgatattttcctgaactcctcgattagccgtgctctggtatacacatttgagcacggagcactgttactaccactgatccccggccaatcgacttctacggctgtcgatatcagtgaacgtgacgaaaatggtattgtggtcatcgtgggccgcgttgggttcctttcactggatccgtttcagccaaacggtcaggccgccatttggaggtattcaaccgtaaccaatgaagtgctggactcctttgtgttcggtccgttgcccgggtttccttttgcgacgggtttaagcgttacaaacagcggcaaagtactgggcgtttctcgtaccgcgccgatgatcggcggcccaaacccgcaaggaatgatttatgatatcggcgcaggtaccttgtcaccggtggtcttcccggtcccgccatccgatatgaataacaatgacgttctggcgggtgggacttggattggtcctctcggagggactccagtagatattggcattcctagtgggacgaccagcgcgtcgattgctcgcttgaatgacatcggaaacgccgtgggaaccgctctattcccgtttaccgatggcgcaggccgctttgtgcgtggtgcgattagatacacggacggctgggcggtactgtggaacaatagtgcattcgattttggtgttgatataaacgatcatggcgacgtcgtgggcagtatcggcatttcggcagcgacgcgcccggcactgtatatcgaggctctcggaggtacgttccttatcgaaggcctaatatcaccctctaccccggcctccttaggcacggtagcagcgatcaacaatcatggtcagattgtcggaggtgggccagctattctgttgaccccgctggggactatgattataccaggtgatgtgaatggtgataccaacgtgaacttacaggatctgtgcgcctggctggccgatccggtggatctggacgacgacggcgatgccgatgcggacgacgaacaatggctgatcgcccgtcttacatctctaggttttgctgttgaggattgtaacatgaatggtgtcccagatgcgtgcgacatcggtagcggcttcagcgcagactgtaatgaaaacggggtacccgatgagtgcgaaccggactgtgatgcggccggactgccggactcgtgcgaatcggattgtaacgcaaatgggatccctgatgaatgcgaaattgcttctggcctggcgcaggattgtaatgctaatggaataccggacgagtgcgatgcccctgatattgtcaacgcgatgcgaatctacgatacgccgcccttgctttttgctggctcggtcttcaccgatagcttactggttacagaagttggtgtgattgccgatgttaactttctcctgaatatcgactatcgtatcggtgatctggcggttaggctcgcacacgaaggcgtgaccgttacgctcattgcacgcccagggattccgatgaactcctttggtaatggccagctcggctatcggatcacactggacgacgaaggcaacggtccgaacattgagaatgtcggcaacttcggaagcccctttgaacctatcacttccccgccttcataccgcccgaataaccctctcgcctcgttcgatggtctgccgcgtgcgggcgtgtggaccatcgaagtcgagactttcaacgcaagtcctttaaatcagctgttgagctggggtcttgatattctggatgaagcggtgccggtggcaccatgcgcttgtccgggggatactaacggtgactcacaagtcaattttaccgacttgaatgaggtactggcgtcgtttggcggggcgggcgggaccggtgcggacctgaacaacgatggagttgtcaactttgccgatctaaacgaagtgttagcaaatttcggggtgtcttgcccgtag

SEQ ID NO: 1014 - DNA, 453 bp, Artificial Sequence
  Synthetic Polynucleotide
atgcaccatcatcaccatcatggtggttctggtttacttgcacgacaaaatactaaccatattaacaataactttgttgccatgaaggcgaaaatgaccgtgtatcagaaaggaggcaaaatgcccatcgtcccagacccgaagaaaaagatgacagctgatcagcaattcaatgcgtcagcgcgttctagggaggctgaaaacctgacggaaatgagaaatgccctgaaacctgagggtaaagaagcagtacgtaaatttgatgaagagctcaaagccaaaggcttcatggtggttaaaaaaccgagtgtcaaaaagatggcagggggtggtaagatgccgatgtacgggatgggtggcaaaatgaagaaatatctgaaaggcggacaggttaaattggacaaaaacaaggatgggaaaatatccggtgcggactttaaaatgatgaaataa

SEQ ID NO: 1015 - DNA, 912 bp, Artificial Sequence
  Synthetic Polynucleotide
atgcaccatcatcaccatcatggtggttctggttctaaaaagatcctggtgatagccggtgttttgttagctgtaggaaccgtggcggcaattagtgcgccccatttccgcggcgggggtcctatgaggggcccgcacggcccagcctttggtgagtttggcggggatcttttcggcggttcgccggtccgttttggcgaacggctcaaagaactggacgctgataaagacggagttattactctggaagagttcctgtcacgccgtgcaccaacgtttgcgcgtatcgataaaaacggtgacggcgcgatcgatcgagccgaatttgaagcggcggctaaagagtccgccgattattggacaaagcgcttcattaaacgttttgacgcagatggtgatgggcgcattggcaaagaagaatttgccaaggcgcatcgcgaacgtttggcgatgcgggacgtcgatggagatggtcagatcgggttagaagatatgccgccgggacctagagagcgtctgcgccgatggatgggtgatcgcgcaaaagacggcgaggacggcaaggaagcacgtaaaggaaccgaggaaagcgggaaagaggcgaaagataggggtggcttcgatcttaaacgcttcttcggtcgtgctgaccgccgttttgaccgactggacaagaatggcgatgggttcattgatgccaaagatctggaaccggtagccgcagaacgcgctgcttttgcaagtaaaagattctttcgtcgcttcgacgccgacggagatggcaaggtgacgaaagatgaatttaaccgtttcgcgaaagcgcggtttagctcgtttgatatcgacggtgacggtaaaatcaccgacgcggatttgcctccgatgatgcgggggcgtggctttttaaaatga

SEQ ID NO: 1016 - DNA, 603 bp, Artificial Sequence
  Synthetic Polynucleotide
atgcaccatcatcaccatcatggtggttctggtgcgacgcctgggcgagacacccgtcgcgctagcaaggcctcacccagtcggatcccggttcgcccgtcgccaagaccggcaccgcaggcgccgtccataggtgagccacccatgtctcgtaaccctattcaaacaaaaacccgtatcggactcctggccattgcccttgtaggcggcgcgaatttagcaactagcgcctttgctgtcgaagcgctgccgcagggttatcagctagcagcggcggataaagctggcgaaggtaaatgtggcgaaggcaaatgcggggcatctaaggcgaaagtgacgcaagccgaggggaaatgcggtgaaggcaagtgtggggatgcctcattcacccggaccgatagcgaccatgatggtaaagtgtcgcgagatgagtttttggcagttgctcgcgaccgcgctggtgacttcgatggaattgatgcggatcacgacggctttatcagtgaagctgaagcgtaccaacatctgaaaaacgtgttcgagtccaatggtaaaccaatgccggccggcctgtttgcacgctttcagggcgaccgtcactga

SEQ ID NO: 1017 - DNA, 348 bp, Artificial Sequence
  Synthetic Polynucleotide
atgcaccatcatcaccatcatggtggttctggtatgcgccaattactttgtgccctggttgtcgtagctatggggctgggtatggtgggcatggcacgagcggcggacgagaagccgaaaaaacagtttgatcctgaagccgcattcaaaaaattggataaaaatgcggatggcaaggtgtgcctcgacgaatttaaaggtaaaaagaaagatgaagccctggcgaacgctgagaaagttttcaaagcaaaggacaaagatgccgacggatttttaacgctggaagaatttaaggcgcccatcaaaaaagagggggcgaaaaagcagaaaaaagaaaagaaagagtaa

SEQ ID NO: 1018 - DNA, 2238 bp, Artificial Sequence
  Synthetic Polynucleotide
atgcaccatcatcaccatcatggtggttctggttgtttaactgccgaggcgacatctgtttccctgtcggatccggctcgacgtgcaaggctcaaccgcgcgagtcttctggtcctgaccgccggattggcagtgggcgcgacggcttttgcggccccactgcaacttcgggccggtgcaatcgacaccagccgccccataaatgcgctgcaagtagatgaagcggctgatctcgggctgccgcctgccctggtggacttgcgtccgtcagatcgcttggttattcagctagatggccctatgacgaaacagcgtcgcgcggcaattgacgccaccggtgtcagagtgctgggctatttaccgcccaacgccttcattctgacgatcccagaaggagtgaatgctgatgcagcccgtaacctggactttgttcgttggagcgcgccgtaccagccggggtggaaggtagaaccgtcccttttaggtcttgagggtgctctggatgtgaatatctcgttctttgctgatgaaactgaagagttagcgaaaaacgcactgaataccgtcgctggcgtacaggtgcataacgcgggcagaaatggccgcgaaatcttggttaccgcaacggtacccgcgaacctgttatcacaaattgccatgctgccaggtgtccagttcgtggaaccggccctcgaagcggttgagcgtaacagcacctctcacgacgcggtccaaagcgggcagagtaatttgcagccactgtggagtaacggactgactggcgagggtcaagttgtgggggtgcaggactcgaaaattaacgtcaatcattgcatgtttgtagatacaatgccgattggcccgggtcaccgcaaaatcgttaattatataggtacgttgggcgctagcacccatggtactcacgtcgcgggtaccatcgcgggcaaccgcattgggacgggccctgatgatgactttcatggagttgcatactccgccaaaattgcgtatgccccctctccggcattcctcaacggcacacagttctacaaccagctggaaattgctcataattttggggcccgtgtccacaccaactcatggggcgcggacgggcgggtggactataacgcgtggacacgcgccatcgatgatttttcttacgacttcgaggattctctggtggtcttcgccgttacgaatcagggcgttctatttaccccagaaaatgcgaagagtgtgcttgcagtcggtgcgagcgatcgtagcttcccgactggtatcaacaatcactgcactgcgggtgtaggcccgacccaagatgggcgccgcaaacccgaagtgtatgctccgggctgtggcatccagtcggcgtcgtccggatcatcctgctcggttcaaagccttagtgggacctcgatggcgacaccggccattagcggcgctgctaccctgatacgtcagtattttaccgatggctactatcctaccggtgtagtgggtgaaaacgaaagtgtctttccgacgggtgcgctcctgcgggcagttgtcttaaacagcacaagagacatgacggggatttcaggatttccttcaaatctggagggttggggccgactcgttgcagatgacgccctgtattttccaggggacagccgctccatggtggtacgtgatgtgcgcaatacggctgatgatgcgcttgctaccggagaaacttacgaatttgccgtgcaggtaaacggctctgaagagctgttccgtgctaccatggccttcacagacgcacccgcggcggccggtgcttttaatgccgtgatcaatgatgtaaacttagtggtagaatcgccttctggtacgatttatcgtggaaacgcaatgtccggcggtctgtctattccgaatacagcaaccacggatggtataaattccgttgagcaagtccttgtcgcgagccctgagccgggcgtctggacggtgcgcgtggaagcaccgagtgtaaacgtcggcgaacagggcttcgctatcgcggtaactggggaggtggctgaggcgagcaccgtcgattgtagcggagatacaaacggagataatgtagttaatttcaccgatctcaatggtgttctggctgcgttcggagccgacgcccgaggtccggcagacattgatgggagtggcacggtggattttacggacctgaacattgttctatcaaactttggcaatgactgcaactaa

SEQ ID NO: 1019 - DNA, 1773 bp, Artificial Sequence
  Synthetic Polynucleotide
atgcaccatcatcaccatcatggtggttctggtaataaaaacgccgtgacgttgatcctcggcctgtttactgcgctttccgctttatctgcggcagcacaaaccctgcccgagtcaggttggcgtaccttgacatacgacaccacgaaggccccggcggataaccctctgaaagggttcgttccatttagcggcgaatatgatacgttcccgcattcgatggaatttgattatgtaggtttcgccaccctcatgagtggaccgaatacttttaccttcgagacgggcttagaaccgcttctgaacgacattgctggtcgggggcaccaggcgataatccgcgtctacttagactatcctgatacagataccagcgtgccacagtttctgctagatgcaggcgttaccctgactccgtacaacgggagctctggccaaggtatgtcaccggattatgacaatgaaaacctggtgtcggcactggaagcgttcattgctgcgtttggtgcccgctatgacggcgaccctcgaattggcttcatccagctgggtattttggggcattggggcgagtggcacacttttccagaggaagaattgctgcccagtgtcgccacacagaatcgtgttctaaccgcttacgatgcggcctttgatcaaactcagatactggtgtcccaggacattctgggacatgatccgatggctgcgatcgcaggtaaaaatatcggctttcacgacgatgatttcacgaacgcgaccctgccgacagatgaatctcatttttggtcccgtatgcaagctaacagcttagatacgcgctggcagaccttacctaatgggggagaagtacagccggactttcaacaagtcgtcttcgacaatcccagcacggcgccggaggatttcaacagttgtgtggacaccacacacgtatcatggctcctttaccatcaggcgttcgaaggggaatcgggtggtagtaacggttggaatgccgcgaaggttcagagagccattgcaggcgctaaaaggacgggctatgagttctacatttctgaacgcaatctgcccgatgtgagcgaagataccacgctccgtctgggtgtgcgtatccaaaaccgcggactagccccgttttattacgattggccgtttagcattaccctgctacaggtttccggcaaaggtattaaacagatcgctctaccagccccggattgggcattgtcgtcgataccggcagatggcgcctcccatgaatttatctatactctggaccctaacccgcttagcgcgggggagtatactgtctatctgtcggtaccaaacccactgccgaacggcgcaccgattcagttcgccaatgcgaccgagacggggaccggtgtggcgcttggaagtctgattgtccatcagtccttggaacctggtgaaggcgaaggtgaaggtgaaaccgatctggaacgtaaaggcgacgatctccttacgggatatgacgacctggatgaggatgaaagcggaggcctcacactggcagaggcacgcgtcgaggagccaggcctcactcaagcagcatttaatacgatcgatacaaataataacggcgaactgtctgaggcggaattaagggctcagctgccccccgggggtacttctggttgccggttactgggtggcaaagatgcccgctttcagcacggtgacgtgttcctgttaggactggccagcgcgctgctgttgttgtggtcatcgcgtaccgcgcgcgtataa

SEQ ID NO: 1020 - DNA, 981 bp, Artificial Sequence
  Synthetic Polynucleotide
atgcaccatcatcaccatcatggtggttctggtacaacttttgataccggcttccgtttaggagacggtcgctggattatcgggtctagggtgcgtatgagctatctcgatagtcttggccactacgttcctacctcctggtcggcttatcattttgtcaataacacgttgggtgcggtatactatagctcaggccatcgaacgttctttgattacgaattttataacgacataaccttcgtggcagacttcgcccactgctatcgcgcgcgcgccatcgcgaccgcaggaaatgctagtcaagaggttgggagcggccgtgtctgtacaccgtggaacgatcccatgtccgaaccaccgggtgagaattgcgtgcctacagaatggtttgcctgtccgccgccaggctcgccgcagtacgatgatccaaacaatatgtattgcaacggtccgtgcgttactagccccctgattgtaggtctggaccggggccgttaccgcctgacggatgctgcacatggcgtgcgcttcgacttagacgcggatggggtcccggaacagacggcgtggacggcccatggtgagaaactggcatttcttaccctggatcttaatcaaaacggtagggtcgacggaggccgtgaactgtttggtgataagacttatttgccgaacggggccaccgcggcgaatggctttctggcgctggcacagcacgattcaaacggcgatggtgaaattgacgcgtctgatagagtttggcctgccttgcgtctctgggttgacaccaatcatgatggggtgtctcagccgaatgagctgaccccaatcgcaacaagtccgattcgtcgcttaggactcgcccaccatcgcacgggcggtcgagatccccatggtaacctgttccgttaccggggccgggtgcaatttacggacggaaccgaacagaattattacgatgtattcttcgtgagtgaataa

SEQ ID NO: 1021 - DNA, 546 bp, Artificial Sequence
  Synthetic Polynucleotide
atgcaccatcatcaccatcatggtggttctggttttaaagggtgcttggccatgaataagatgactatagttttatgtgtggtcttctattctttttcaaacgtggtagcagctgaggtcagttccctccaggcggcgggcggacaagtgattcttgactggaacgataatacggaaagcgatctgacaggttacaaagtttatcgttcggttagccaggaaggcccgttcgataaaatcgcgcaagtctctgccagctactatgaagacgacgatgcaattaacggtaagacctacttttatttcgtgaccgccgtagatgattcggccaacgaatcccctgggtcagataaagcgtacgcgagtctgcgcaccccaggcgacattgatggtgacggcctggtcggatttacagatctggctctgtttgcaaggagctggctagtgaatgattgctggtattgtgacggcgccgatctcgacggtaacgagcaggttgatttctatgatttagcgatcatggcccagaattggctgagtgagtga

SEQ ID NO: 1022 - DNA, 1758 bp, Artificial Sequence
  Synthetic Polynucleotide
atgcaccatcatcaccatcatggtggttctggtcaagggatacaggtacagacgcgtagtatcgttgtgctcgcgttgctggcctcggcaggacgcgctgcgtttgcagaccccgtcgtgaacgattattgcgttgagcacgatttcagcattaggacacggggtaatctttcccctcatttagtcctgcaacatcgagaatacgcctttgcgcagtgtggccgcgctaaggacggcccaattgataaccgcgcaaatactctggtgggcttaggtgtaaccaccttcaacgcccacgcggacgctggtactgtgtctgatgcgaatagcgaatcaaacgttacggccctggcagtaggcaccgcgagcggggagatccgcgtgtatggcgatgtcgatttgtgcccgagtgctccgcgtcagcgttacgcgtatgggcgcgcattttccgcggccaaactgttctaccgtggtcggaatatggatcgtagaggccgtattggatgggccggtggctggcgcgcagaaccggggatccaaggtggcattggtaaagtcaggcgtattgaccccgttatcggtcgagtgaccgatcgcaccacaggggttacgacggaacatctgttaatcgacattgaaaactttgtgcagggcggcgtttttgagtggctaaatgatcgtgtgacgaacaccgctcctacaatggaatttcgaattataatgccaggctcggctagtccgtccaccggcttcctagttgtccgggcccgtgacggcgtagttgtagagtcttttgcgacaggggaatttgccggtgtggcagtcccggcggtcggtgacgatgcaaccttcgcctttgatctgccgaacgcgcgcgatatcgaatttgatatgccgggggacgacgatcacgagcttgacgtggaaatcgaaatgggtggtgcgggtgaacatgaagaggcggccggagcgctggcaggggacctgtatattactacggctctcgataaaggccctgatcagagcccgctttaccagcacgacagcgctacggaaccaggagtgccactgttccccggcgagttgaccgtggcccaaccgtttttcgtgtcaccggaacaggcctggactttcgaagatctcgcgttacgcctggtagatccgggctcggagcctttcactggcttcgaggcggtatatgtgcgtctgtggcagggtaccccgggaccaaccggccggctgattgcaggcgactttgaaaccaatcgcttgatcgacaccacgttcactgggatgtacgcggtgatgcgcggtgaagagcaatcagatgctaatcccatcaaggatgcactcgttgatctgacctggcttccgcctctgggcccgggtcagtatgccattgaagtcgctgcggttggaccgggcccgaaccctgttatgctacccccatccccttttgacccgactccccagtggcaaccggcttttataggtttcggaggcctggaatacgaaccccttgtgaccattgatgggcgtctggcctcggttccgatgcttctgttcggtgacaacggtttaggcgaaccatgtcgcgccgacttggatggcgatggggtcctgaccctatttgatttcctgcaatttcagaatctgttcgcgtcgggcgatcctgcggcagactttgatggtgacggtgccctgacgctgttcgattttttggagtttcagaacgcctttgccgaaggttgcgcatga

SEQ ID NO: 1023 - DNA, 339 bp, Artificial Sequence
  Synthetic Polynucleotide
atgcaccatcatcaccatcatggtggttctggtgaaatcgtgctggcaataattgcggtaggcattgtcgccgctttggtttacgtgaatcgcgaggcgaaaaactttgacatcaacaaggatggtaaagttgatctcgaagacgccaaagctgcggtcagcaataccattgaggcggcaaaagcagccgctgatgtaaacaaggatggagtcgtggatgcggcggacgcaaaagttgtggtagaaaaagccaaaacagaagtgaagaaagcggccacgaaagcaaagagtgctgcgaaaaaagcaaccactcgtggccggaaaccgaaggcccaataa

SEQ ID NO: 1024 - DNA, 1128 bp, Artificial Sequence
  Synthetic Polynucleotide
atgcaccatcatcaccatcatggtggttctggtcaagttatgactcatcgttttggcaagaatgcccgcgtgttattcagcgctctcgcactgttggcggtaggttctccagcgatggctaacaccctgaaccagaatgtctcctggacgattgatcgggccggaacaaccgcaaaataccgtatcgtggcgtatggcgactcgatatatgcgggttacaacgggtcaatcagtaatgccgctaaatatagcgcgccgactgttgatgccgaatacctggcagcactttggaacgccgatattgagtccgtgcgccgagctaaatcgggcgcgattgcaagcgacgtctatcagaataagatcgttgcagaacgtagctacatgcaagcggccagtacccgcgtagtgacgtttgaaatgtgtggcaacgacggtctgcaagcgcgtacctctttcaaagggcagacagggacgtgcaattataacgtattatccaccgcggtgaataactgtaaagccaatgtcgctgcggccatggattatattaacgcgaacgcttactcgggtgtgaaactgaaagtcatcgccaacctgtattaccctggttacaacgcagataacgtgcagtcatcgtgcaatgatcccgttacgggcgcaaaggtaaatcttcgcgacaaatttctcccggctattacccagatgaattattggatgtgcgagtatgcccgacagaaaggtttcaagtgcgtggactcttttgcggaatatatgggcgcggattatgactcaaatggcgatggtcagattgatagcaacgcattgaaatatgttccgggagaatcggaatccagttacgttaccagaatcacttctacgctgcgcccaacactgcgtgacgctaacacacactttgtgagcagtacctcgtcatacgattacattcagtccgatgatgtccatccgacgtacaccggtgggactgtcagtgcgggtttgtggggcggcaccacgggcacaggagctgcgaggtacaccagcttcaccggcggccggagccctatttggaatctatatggacacgagagaatggggtggtcactgtctacgcatagtccggctgcaccgtga

SEQ ID NO: 1025 - DNA, 1641 bp, Artificial Sequence
  Synthetic Polynucleotide
atgcaccatcatcaccatcatggtggttctggtcgacttgcgcgccgtgtagcccggcaggctgcgttggcagccgcattagcgtgtccgattgccgcgctggctgcggagagcaatcctgaaccccgccgtccaaacttcatagtcttttttaccgacgatcacgggtggccggatatcggtgaacaaggagttctccaggacctgagaacaccgcatattgatgcaatggcaggtaacggcgctcgttgcatcgccggctacgcgactgcgcctcaatgcgtgccgtcacgcggtggcctgctaaccgggattcatcagaatcgcttcggcctggaattaaacccagacccgctggatggatttaacgctcagcaaacgattgccgataggctacgagaggccggttatgtgacgggcatggccgggaagtggcacctgggtccgcctgcggaaatcggccagcatggttttgatttgttccaccataaacactcggcagaacccggcgttggcaattttgacccggctaccggagaaccaaccccggtgggtgcgaaaccaacgactacctatcatattgatgaggtcgcgcaagccgcgacgacattcatagacctgcaccatgaacaacctttctttttctacgcagcttggcgtgccccgcatgtcccgctggatgcgaccccagagctcttagcacgctttccaggcgaaatgccggaacgtcgtcgccaggccctggctatgatcagtgctatggatgacggggttggcgacgttctggcgacgctgcgcgagcatgggcttgaagatgatacccttatcttttttattggagataacggcgccccgttaaaaatgcacaagctggacgctccgggtggcggaccgggttgggacggctctttgaatgaccccttgaatggtgagaaagggatgctgtccgaaggtggcatccgtgtgccgtatttagtgcagtgggcgggcactattcctccgggcacagtatttacgcatcccgtgaccacgctggatgtgggggccaccctgttagcagcggcgggtcttgaacagccggcagaactcgatggggctaacctgttgcctcacctccgcggtgatgttgcgacggcacctcatgagcacctgttctggcgctggctgggtcaagcggcaattcgtagcggccagtggaaatacctccgggccggcgatacgtatcagtatctgttcgatattgaggcagaccccgaagaaaaacacaaccttcttgcgcagcatccagatatagctgcggatctgttggcccgtctgcgcgcttggtctgacgaacttccgaccccaggcctgccggctgatgtaccaccggcctaccacgactttttcggtttttatttcgaaggcgtagaatttcccgcaccagcgttaccggcacagcccgcggcggcggcaccgggtgctccggatgcccgtaccctatttgcccaacgtgacaaagataatgatggacgggtcacacgcgatgaatggatcgccaagcgtgaactgagcgaagcgcagatgcgagtagtgctaagaaattttgaacagcgcgacaaaaacaacgatggggcgtggactctggatgaaatcgactaa

SEQ ID NO: 1026 - DNA, 1290 bp, Artificial Sequence
  Synthetic Polynucleotide
atgcaccatcatcaccatcatggtggttctggtacccaaatctctcacaagttacgtattggagcactactgtgccttataattacggggtttggcgtcggcatgtcccaggctgccatcactttcaacatcacagcgggtccgaccaccctgacaatgccagacggtgcggtaattgatgcctggggctttgccctcgttagcacggatattaatggtgcggtgactttggggcagggtattgtgaaagttcccggcgatccgttaatcgtccctccgaccgaaaccacggtgaccattaaccttacgaataacctgcccgagccggtcagtctcaccattctgggacaggttctgacccctgcgggcggtccagtgtggacctcggggctgaactcaagcgtatcggcaacaggcgctcgaaatgcaaacgactacgtctcccgcgtgcggagcttcgcccatgaagcgccggcgggcggtgtagccacatatacgtggaataattttcgtgctggcacttatttgctgcaatcaggcacgaacccagctaaacaggttcagatgggtttatacgccgcaatcaaaaaagatactgcgccgggggaagcatatccgggtgtaccgtatacccgcgagctgattttggtgtactctgaaatcgacccgataatccatgccgcggttacgaccggaaacttcggaccctcagggaccataactagctcgctgcaccgtgatccaaaatactttctgattaatggtatggccttcgatagctcccaaccgggaggcggcttggaccctgtggtgtttgttgatccatttgacaagctcttggtacgctcgatcaatgctggctatgagcctcatgtgccgcagctactgaacatgtacatgaaaacagtggcggaagatggcaacccgtatatttacccgaaacaccagtatggtttccaactccccgcaggcaagagtatcgatgcgattctggaaccaacaactgacgggaggtactctatccatgacgcagcgctgcacctaaccaacaacggcgcggctagtccaggtgggatgctggcttattatggagtctcatgtgttggtgatctggattatagtggcacggttaattttgaggatctggctattctgcgcgccaatttcttcgcggaatgcaccttaggcacgccgtgtactggagatatcaacaaagacggttttgtaaattttaccgacatgggtctgttacgtgcaaacttttttcgtggcggttgcccggtgccataa

SEQ ID NO: 1027 - DNA, 375 bp, Artificial Sequence
  Synthetic Polynucleotide
atgcaccatcatcaccatcatggtggttctggtaagcggagtaacataatgaaaaattcgacgttaaactctatgctggcagggagcgttttctttctcatctccgccggatcagcgcttgctcaagagacaactgcgccggaatttcaggaagtagatgcaaatgcggacggtgtgctgaacgcctcagaagccaacagcgctttgcccgcgctgggccttgtcgatggcaatcaggatggtgtgatttccaaagccgacgttaaaaaggtcctgaccgacatcgatttcgctgaggatgatcaaagcgcaattggcccatcggattatcagcagattgtacaaattatggagcagatgctaaataacgcctaa

SEQ ID NO: 1028 - DNA, 501 bp, Artificial Sequence
  Synthetic Polynucleotide
atgcaccatcatcaccatcatggtggttctggtcgtcagctccgcccgaatcctggtgataaggacatgaacaaaacactgcggaacattcttggcggaggcgttttattggcgtgtgtcggtgccgggggcgtgtgggcactgaatgctaacggtctgaatctgaaaccaacggcgaaagaaactcgtcgcgatctgaccgcgatgaatagcacgcaattactcgacttctctaagaacacctacgtaatgaccgatcgaaacggggccggctttatagttctatatgaggctccgaaagcccgcgcaacatcgaaaactaacggagtggtgaccaaaacggattccggtccccaggtctggatgaaaaggtttgaccacaatggggatggcaaggtgagctggaacgaatattacgacaaagttcgtttcctggcgaaaaatggtaaaaagcgtagaccgggcgatccggattgcccagactgcaaacctgtagtctag

SEQ ID NO: 1029 - DNA, 759 bp, Artificial Sequence
  Synthetic Polynucleotide
atgcaccatcatcaccatcatggtggttctggtacaactaaatttcgccttacggcggcagccattttgctaggcaccctgggggctaccggtttagcggtagcagacaccggcttcggaagaggtggcccagggatggagcgtgaaatagattttacggccatcgatacagacggaaatggtatgctctcgcgtgaagagctggtggttcgagcgaccgaacggttcgcagccgctgatacgtctggcgatggtaacctggatcgcgcggaactggcggcgcaaatgcctgccccccgcggtggctttggaaacatcttcggcccggaccgtgctcagcagagggcagatcgcatgctggcgatgattggtgcaactgaagccggccaagccccgattggggactttgccgagcagcgtgtgaatatgctcctaagctttgcggacgaagatcgtgatgcagcaatttcccaggctgaggcggatgctatcggccagcgagcgatgggcggtcatggtccggaagggatgcaacagatgcacggacgcatgggtcatggcatgcaagatggagctcagggcgggatgcgcggtgccatgctgcaagacggcgccccgggtcagatgccaggaggtcagatgcaaggcgggggccagcagatgcagggccgtatgccgggcgccggtatgcaagatggcgcgccatgtgggaccccgggtcagatgcgtgggtacggttatggacagggtgcaaactag

SEQ ID NO: 1030 - DNA, 492 bp, Artificial Sequence
  Synthetic Polynucleotide
atgcaccatcatcaccatcatggtggttctggtaatcgtttgatcttaggggcggtcggcacactgcttctcgtgggtataggactgttctggtggcaaggtcgcgccgaggtagaacagggcgcacccccgccactggctgaaccgcctatgccaagtgacacgctgccggaggcggatgccttaggcatgttgggcccggcgcctccggaagcaactgaactgaccagggaacagcgccgttttttccgatacgatcgcaaccgtgatctaaaaattaccagacgcgagatgctgtcaacgcgggttgacgcctttcgtaagttggacaaagatggaaacaatctgttaacctttgaagaatgggctgtagcgactgtggagcgcttcgaaaaatccgatctgaaccgtgatcaagaactcacccaggccgagtttgcgacgaccgcaccaaagccgggtgctaaaaaatcgtgtgactgctctccctaa

SEQ ID NO: 1031 - DNA, 930 bp, Artificial Sequence
  Synthetic Polynucleotide
atgcaccatcatcaccatcatggtggttctggtttagtgcgcctctcgcgagacggattgaatgtatccctgcccatgctgcaacttgggctggttgcctttgcaatccacgctgatcggtcaatgggttctgcgctggctttagccctcctgctgataagcggcctattcggctggtttcgcagcttgcgtcatgcgcgtcttattgtcgatacaccgacgagtcgtattgcctctgcggcacagggttacactgagctgcgcggtcggggacagccactgcatggcacccctctgctgtcaccgcttaacggcttaccgctgttatggtatcgcctgagtaccttcaggaaaacttcggacggcaagtggcgccacgtgtcgaccgaagatagcgactccacgtttctcttggatgatggttcaggtgtttgcgctgtagatcctgacggcgcggaaatgttaatccgccgtaaagacgtcgtggagcgtggggaacttcgtcagatccaatggagcttattgaggcatgatccgatttatgtcctgggtgaattttctacgctgggaagcattagcccggatctggatacctcccgccaggtgcgagagctgttagcacattggaaacaggatcaaaaaacacttctgaaacgcttcgacttggacggcgatgggaccattgacctgaaggaatgggaactcgcgcgcgcacaggcccgtcgtgaagtggttaaacagcgggacgcagcgctggcggcccctgaggcgcacctcatgcgtaagccagcttcgcggctatacctgatcagtgatctggatccaagacaaatcgctcgccgctatacactgtggtccgtttttcacgccgccattttcctaggcgcagcggcgactctcgcttggttcggacaaatcggtgtgagctaa

SEQ ID NO: 1032 - DNA, 942 bp, Artificial Sequence
  Synthetic Polynucleotide
atgcaccatcatcaccatcatggtggttctggtcaagccaaactggtcgcagttcttgtagtgggggcggctgcggcagccgtcggcggtgcggtgtttgctttcggaggctcgaagagtcctgaaccgcaggcaatgccagttccggtgcccccggcgccgcagccagtccctgttgagactgccatgccggtgtctccgtttgacagctcaccttccttaaacgatatgatgagcaggttcggtgggggtcgtggcgattttggtgactgggaagctcggctccaacagttcgattggggcgaatttcagcgcctgtccccggaggaacgtagagcgcgtatgcaagcgatccgcgccgaaatagaggcccagatggataccaatggcgacggggtagtggatgaagatgaacgattggacgcgatgttagcttctcctatgggtcgtcgcattctggagcgctttgacagcaacggcgatggcatcctggatgaagccgaacgtcaggccatgcgcgaagaagaggcaagacgtcgtgcagaacaagaagcgcggatgctggaacgctgggatagggacggagacggagttctatctcgccaggaacgacgcgccatggagcaagatcagcgtcgtcgccaagaggagcagatgcgccgtatggcggcagaatttgaccaggatggtgacggcgaactgaatgcggatgaacaggcacgcgcgtggcagattacgcgtgaacggagagagatcgatgctttcgtaaggcgttatgacagtaacggcgatggtcgcattaatacaaccgatcttaacgccttcttgcagctgtaccaagccggggaccgccgtgccgatgtaaacaatgacggtgttgtcgatgcactcgatgtgacggcattccgcgatatgatgaaccgctcggctaatcgcccctaa

SEQ ID NO: 1033 - DNA, 576 bp, Artificial Sequence
  Synthetic Polynucleotide
atgcaccatcatcaccatcatggtggttctggtaagaaaacgctgcttgcggcaggaggtgccttagctctggcggcagccataccattggttgctctggcggaagggggctggcgaggtggctcaggcggtcaccatggaggtatgatgtctggcggggatgggtcgggccatcacggtcgccatggcgggcacggcggaaaagccggtattctcgagctgatcgacatttacgatgcggatggcgacggtaaagtgactcaagcagaagtcgacgcattccgtgcggagcgcctaaaaaagtttgatgccgatggcgatggtcagttgagtttagcggaatatgaagctctgtggttggacgccatgcgggaacgtatggtacgtgcgtttcagcgccatgacgtggatggtgacggccaagtgacaatcgatgaatttgggcgcaactatcgtcatatggttattctacgagatcggaatgatgatggtgcaattgacctggaggatgccggccctcgtggtcccagaggggagggccgcggaatgggccgcaggatgatgcagcagccgtag

SEQ ID NO: 1034 - DNA, 399 bp, Artificial Sequence
  Synthetic Polynucleotide
atgcaccatcatcaccatcatggtggttctggtcgccaaaatttacggcgtgaacgaacacttttcctgctgtttttgggggcatcatttgtcgcgctcatggctgcgctgcccattgtaactgcccagcagacccaggctacgcctaaatcggaggaaatgcaaaagagttctgccgcggccggtagctccgcaccggctagcccagcatcgtcgacctccgatgcgccgagtttcgaacaggcggaccgcaacaaagatggatttgttgataaatctgagagcggcgtggtgccgggcctgtctgccaacttcgaacgtgcagacaggagccgtgatggtaaactggaccgtgaggaatttgctaaaggcatacaaatcctacaggttcggcgctaa

SEQ ID NO: 1035 - DNA, 1953 bp, Artificial Sequence
  Synthetic Polynucleotide
atgcaccatcatcaccatcatggtggttctggttcggaaacacaattgcttatcgcccgcaaggtcgctaccgagcctgcggaactcccagcagttttacgtagactgcaacagaaaattggcctggacccctacactacgcggcagcgcctgttagggcgtggtctggcgctgctcgcgaaaggccgaccggatcagctggataccttggccggagaactgacgccgttaggcctcaatctagtacgtctgaccccgaccccgccacgcttcgagccccagcgtctgacggcactgcggcgctctgctgacgcgatacattttgcgttgggtgaaaaacagctgtcccttcaacgcggtgaagcagtggtggccattttggcggagcttagcggcgccctgatcgaaaagtcattgaaacagctgatggttcaaaacgcttatcgtggggcagatgcggtagagccaattagcgatcaggaagtgtatcgtgccatcctaagggcaaaaccggtcctggacctataccttctgggtaacgatggaaaaccgcgcggcgcggtccgcgtgtttcctgggcgttatgatccgaaaggtttgggcgaacggatgagttacagtggcgcaggaaatctggaagctttgctagagctggtgcgcgaactggccggtcaattcacattacactccaactttggtctggatctgttacctggttgcaagttaaaaactggcggcaacgaattaccgttctcacaggacaatttagcttctcttacccgttatggctggctgatgcttgatctggccgcggccacgccgcaaccgacccctaccccgacgccagcgagcctcctggcagcaactggtgtagcggaactggttgaacttgccggcgaactcgcggaaaaagatccgtcgcccccaagcgcttccaagaaacccgacctgccgccgcctcctgagctggcagaggataccccaggggcactgagacgcttgctctcgtttggagctacagcctttggcgggattatttaccttgcgctggaaggtccggggctcctgttcggcttttttaaatatggtttcggcagtggcgtccttccggccgttgccgccggtctgtgtggatggggtggcttctactttctgaggttaaagcgtaccatggaaaatacgccgacttcccgcgcgcgtagtctcgctatgggcatggttgaaatacagggtcgcgccgtgcgacgatatgcggtcgtgtcacccatgactcatctcgcttgcgtgtattggcgtctgcaaaaatttcgccgggaccagaacgaccagtggaaatcggtcggtgtaagcagctctggaccagtgccgttcgagttagaggatggaaccggccgtatcacgatcgatccgcgcggcgcctccattcgttgtcgccaacggcaggaggggtttccaggtcagatgtcactgctgttctctggcagcggttcttctgacatgcaggaaaaatgggttgaagaagtcctctgcgagggtgcgagtctctacgttctgggttttgcaagcgcgccatcttctcagggctcaagcctccgtgaacgtacactggaacggcttcgccaattgaaaactgatcctcaggcgctgtcgcagtatgatagcgatggggacggccacatttcccaagctgaatgggatgctgcacgacaggcggaagaagagcgcgcgctacatgaatcactgcaaccgcggcagaatagcagccacggacgcgtgcgtccccagatcgggcgtccgccacagcgaggcttaccgtttctgattgccgagtccgccagcgaggcacatctgagtcgcaactatgcctggtacgcaggtccattattgatcgcgggtctgggctttgcagtatggaccctgtgggtgtggacgggcttctttttcccggcgtaa

SEQ ID NO: 1036 - DNA, 903 bp, Artificial Sequence
  Synthetic Polynucleotide
atgcaccatcatcaccatcatggtggttctggtgattttctttccgagaataaacgagggttcactttggtcgaactgatggttgtagtggcgatcagcggcctggtggctatagccattatgggtgcatataaggcgcagaaaaggattatgggagcccaagaagttgtaacagacatccaggagaacgtccgcaccgctatttttaccttaacgcaagatatccgcatggcgggctacgacccgaccctcagtggtgggttcggtatcacgtatgtgggctttcgggatctaggcgatgctaacgcagtgggtggaaattctgcgttccagtttacggcagactacaacagagatggcgttgtcgatggtaatgaacgtgtcaccttctcgctgtatgattttggagacgaccagggcgtgattgggactatgaccgacctgggccgcaacactggtggcggccgtcaattgctggcccagaacattcaggcgatcggtcttgcgtacgcctatgatgtagataataataaagctttggatacatataccacgactgccggtacccaacaggttatttgggcaatcgattcagacaacgacggcaccttagaccgtcgcctggataccaacggggatggtgcgataaccaatgcagatgggccaggcgctggcattaacgaactgatcgtgggcgccgcgattgcaacgcccgttgctatggcggatgttcgcgcggtacgtatctggttactggcggccgaaaatgccgcggaacatacggagtactacgatccgaatacatatgtggtaggacgtcaaattgtcagccctcgcgataacctgagacgtcgactcgtggaaactacggttcagtgcaaaaatatgggcctgaacgagtga

SEQ ID NO: 1037 - DNA, 723 bp, Artificial Sequence
  Synthetic Polynucleotide
atgcaccatcatcaccatcatggtggttctggtaggttccggacagtgatcggcgtattagcatctgtcgctactgttgggtcgtccgcgtcagccgtggtgataaatccaggtcaaacgagcgttttgattggtaccaacagtgttcagagcccttggctgtcagtcccgagccccggcgccgtacgtgtgcgcttttttgtgcttggaccgccgttcaccgcgatttactctggagatctgctcatctcgctgggcagtacggtgcccctctccgagccggtcctggtttatcgcctggaaaacacctgggctgaagacgcgacccgtcgagtcacttcaattagctttaccggttacaaggaaattcgtatcgatgcagacttccgcacggatctaggcgggacggatgagccaaaacgtgtccgtcgctccgccgacggtgatacactgacctttgaatttgaaactccgatccctggcaatgtggcggttaccaaattcgtatttggctataccaacggagcaatgttagcgtttgacggtaccgcaacgattttgctgcaaacaggtgagtcggttaccatcgaaggcctcccacgcccgtcgcatggcgtggccccgacgctgccgagctgcgaaggggatactaatggagacggtgtggtcaacttcagcgatctgaacggtgtgcttacaaatttcggggaggaatgtccatga

SEQ ID NO: 1038 - DNA, 2976 bp, Artificial Sequence
  Synthetic Polynucleotide
atgcaccatcatcaccatcatggtggttctggtgccgagagtaacgacatcgcggaatcaaataacaccgaacgaccctcgtccgaaaaacagattggcccgtatcgcttactggagcctttgggtcaaggagggatggcaactgtatttattgctgaacatacgaagctgcggaaaccggtggcgcttaaactcgtcagattcccaaaacaccagatagatgcccgtgcgcgctttgaacgcgaaatcctagcaattggcaagttacatcacccgagcatcgtttctgctacagatgcgggtcaagacggcgatctgcaatacctggtgatggagctggtccgtggacttgacctgagccgtattgttcgtcgcctccccaccttgtccgtgccggatgtatgtgaaatcggtcgccagaccgccattgcgctggcctatgcacatgctcaggggttcgtccaccgtgatattaaaccttcgaatatcattcttgacgagcatggcagcattaaagttttggattttggtctggtgatgtttgatcagtgggattcggcaatcagtgaactgaccactgtaggccagttcctcggaacgttggactacatcgcgccggagcaagctgaacgttctgggggtgtggatcaccgtgcggatttatatgccctgggcgcgactttattccgcctgctgtgcggcaggggtccactgtccgtgtctccgaacatgacgccttttgcgaaattgcgcctcctagccaaccatgttccgcccaagcttcaggaactgaggccagatgcgccggcctcactgtgcgaccttgttaatcggctgctgcaaacctccccgaccgatcgaccggaaagcgcagaacacgtggcagcagagttagctccgatgtgtggggacgcgaatctatcggtcctcatacagacagccatgagcaccgaggaacaagcatcattcgaacctccggacagtcgcattgccccttggagcaaaccaagcgactcccgtacgccaagctccgatccgggcaagaaagccaaagccgattcttctaaactttcagcaggtcgcggcaaccggtttacaaattggagcaaatgggtgctgagtgcccttgcggggtttgtactgtatggtgtcataatccgttgggaaaccaaagaaggtcagctggttgtggaatccgatctgtcggagggcgatattaagctcagacgcattgatgatgggtctgaacagaacctgaaaatcgaaaccggtaacacggtgacaaaactccgtgctggcgagtaccagctggaattagcgagttcatcagacaacatcagtattgagaatggttcgtttgtcatcgctagcggccagacggtgattgcgcgcgtacgcctagagccatcaacccccatagttccggactcgtcccgagggagccaagaggaagactcagtggaaccgctgtatgatggacttccgctcagtgaactgctaaaactggtacgtcgggaaaaatcccatgaaaagtggaaagttggcgttatcggcgcaacggcgctgttgaaagatcaagcggaccaggaactgtttgaagaactgtacggtactttgcgcgagcgtgaagaatttgagttgatggctcaatggcgtgatccgcgcattgacacggcgattgttgatgaacttaaagctactcccattgcagaacgtgctgccctgttgcgtaaactgacgtctcatttcgatttgaagttcttacccaaaactattgagtgggtttcacagcagcacgatgagaatgcgaccgatgcgcaagagcttttcctggcgatgttaaacattcgcctgaacgaaacctctgacggattacgcgagctgcgcatcccgagcaatgctctgtcagtctttagcaggttcgcagctatggaatcattaaaaccaagcctggcgcacctctatgacgatctggcggtggaatgcaccgacaccaacgagactaaatcaacctcgtatttaggcgattacgacaagcgtgccgcggtccgtctgttgaccggtaaccatgggagcttcggttcgcgggtctgggctattcatcgttgtatccagagccgcaatccaaagctcctggatcttgccggacagaaaatatcgagtctgctggcggaagtgccggatgaaatcggaagcaaatacgcttattcgacgcgaatcccaatttccaatacaggcggcccgttcacggatcttccagcctaccaactagccaagttggcatctagcgtatcccccggctggaaaagcgaaccgagttttttcagaaccgtcgtcacactttggcctagcgcacgcgatgcgtgggaattttacgcgtcgaacgaacgtagcgccggccagattaaaaacaagatagatcagcgttgggccccgattgaccccctccgcttacggtcagactccatgatggatatgggtaacatcgatgtggccgagtcttatgcccaagaccgcgttttagtatttctgttaacaatcatgtcagcgcatgcggacaggacggtgagtgaacgcgatctggcagacttcgtaaagtggtgcgacttcgcatctcgctttggctcggacgatattacgaccgcaaaactgagtgaagagcaggtagaagccattaaacaagagctgaatgttaattcgctgccggatatgttaaacctgaaatactttatctccttaagtcaccctcagggtttaagtctcaccacttcatcagccacctcctcggcagtggatgcgagaatgcgagaatgggtgaagcagaaaatcaatccgtttgatctgaatcgtgatggtcgtctggatcctgtcgaattaagaaattatgatagcaacctgcaaatgtctgacgtggacactaatggtgatggagttgcggatgttgatgaacttgtccggattcgcacaagacgttaa

SEQ ID NO: 1039 - DNA, 486 bp, Artificial Sequence
  Synthetic Polynucleotide
atgcaccatcatcaccatcatggtggttctggtatcataggtgtcgtgggcgggctcggaatggccggcattggcatgttctggtggcagggtcgggcggctgtagaaagcaatgcacctccgccacccgttgcggaggccccggcgccggacccggaagatcttccggtgaccgatcctggtgacatgcaaggcccaacaccaccggaggttagtgatttaactcgcgaacagcaacgtttttatcgatacgatcgcaaccgtgacgggattatcacgcgtaacgaaatgttgtccacccgcacggatgcatttagagcgctggacgtggatggcaataacctgctgaccttcgaggaatgggctgttaccacagtccgacgctttgaaaatgccgatgcagatggagatgaacgcctgacgcctcgtgaatttgccactaccgcgccgaagcccgccgcaaaaaagcccgcatgcaaatgttaa

SEQ ID NO: 1040 - DNA, 2394 bp, Artificial Sequence
  Synthetic Polynucleotide
atgcaccatcatcaccatcatggtggttctggtagcggacgccagtttaaaatggccatcttctgtttttgcgttttcagtgggtttttgttcgcgggtaagtctcccgagattacccctgtcccacaagcagctctgaaaacgattatatccaattgctcgccggtggaaatggactacgatccgcatcgtgtaggccagactgcccacaacacacaactcatcaccgcgcagacgggccagttttcgcagattcataacgatgtgttaccgcggtcacttccagttgcgaaacgacaacgcagcgtatctctgaatagcgacatcggcgatccggacaccatggctcctggtgatgaactgatgctggagttatttgaagatgcattctatgccgcggtcgtggatcgtgttaacaccaatgttaacggtacggtcagcattcgtgccagaattgcgaaccacccactgggatatgcattgttcagtactactcatggtcaaaccctcggctccatccgcattcccgaacagaatcgtcactttagaatcgaatttaaccagaatcgccgcatccatctgttggcagaaatggactcgcatgtgatagataaaatcgagagcgggccgccgctcgtgccgccgtacccgcaagcggaaacggcaacagtcgctcctgatgtgctgtcagagcccctgcaaaccgccgacattgcgaacgttgatgtcatgattgtgtatacgccggctgcgcaggattgggcgggcggtcagaccgccattaccaatattatcgctcaggctatggaaaaggcgcagctagcattagacaactcctcaacgcagatgacaatgactctggtgcactctcgtctgatcaactacaccgaatcgggggactcgtcgacggatcttcgccgtttgacctggacttatgaccagtgggcaggatacatggatgaagtgcacgactggaggaatgaatgtggcgccgatttggttgcgctgtttgctgaagtaagtgacgtcgggggcacaggctggctgttaaacgatatcaacggtcgaccgagctatggtttcagtctgacccgtgtacaacaggcgtcttggacctacacgctgattcatgagatgggtcataatatgggcgcccaccatcacaaacatcaaaactatcaggccgggccgaccgactggtggaattggtcagcaaatcagtggtccgccggttggcgttggactgggaacgataatcagtattactgctctgtaatgacttacgagagcggcaattatttcgcggatggacaaacccatacccgggttgcatatttcagcaacccaagcatttatcatcaaggcgccgctacgggtaactcggccgatggcgataacgcacgcactatacgtgaaatcagacaggttgtggcggggtaccgcaccattaccaatcacggttctctacaggtgacactgttacccgaagccgcggtcctcgatggcgcacaatggcgtcggaccggaacgattcagtggtataactccggtgacattgagacggaaataccggctggcaattgcactatcgaatttaaagagtgtctcggttggatcgcgccggatcctaacaccctgacaattcagaaagatcaaaccgctcaggtggcggccacatatattgaaagtaacgaaatcatcattggatccggccagagtacgtggaactaccccttatcgacatattatgaagacgcccgcacgcaaacaatttacctgagcgaagagctcggtggcgcatcgacgtttgtaagcttaggactgaatgttaccgaactgccgggcccaatgaattacttcaccatccgccttaaacacaccaacatggacgcgtacggtagccagcctgcatgggaatctgtggggtggaccactgtctaccagtccgatgaggtagttacggcagccggttgggtaacctttaagttcgcagcgccgtttacctataatggcagtcaaaatctgctcgttgatataagctttaacaacaatgagtggacgcatgatggcttttgcatctcctcatcagatggtactacacggagtctgttctttcgcacggactctaactatggagatccgctatactgggcgcagaccccacagccgggctctagtacgaattttcccaatattaagttgggcatcggcttaacttcagacctgaacggtgacggtgtagtgaacatcgctgacctagcactgttctcccttaactggctgaataccgcgtgtgcgtccccagattggtgcggcaatgccgatattaatcacagcggtactgtgaattttaacgattttgccattttcgctacccaatggcttaaccagtga

SEQ ID NO: 1041 - DNA, 1701 bp, Artificial Sequence
  Synthetic Polynucleotide
atgcaccatcatcaccatcatggtggttctggtgagcgcgcacttgcgagtgctgacgtggcctgcatcgtctactctgtagcaagctcccaatcattccatcgtctggggacgttttggctcccgttggttcgagcgcagcggcccggcttatcggtggttctggtcggtaacaaaattgatacacgcggagatgatgtgactaatgaagaactggaggacgaaatactgcctttaatgagcgattttaaggaaattgagacgtgtgtagaatgctcagccaaaaccctggttaacgtcgctgaagcgttctattttgcgcagaaagcggtgcttcacccaaccggcccgttatatgacagccgcgaacatgagctgcgtccggaagccgttcgtgcattggaaagaatcttccgtctgtgtgatcgcgatgctgacggaattttatccgatgaggaactgaatgcctttcaagtgaaatgctttcgtaccccgctccaggaggccgaattggaatcgatcaaagaaattttaaaggaagttgaacccaggggtgtacagagagacggcgtgtctctgccgggtttccttgcactgcaccgcctgtttattcagcgcggccgtcttgagacaacttggagtgcgctacgcgcgttcgggtacaccgatgaactgcaactgaaagacgagctcctgcatcctgaactcgatctaaaaaagaacgcagtgatggtattgggtccaatggctaatgattttctgacgcgtttgtttcacgcgtgggatcatgacggccgagggtctttaaccgcggcccagctggaagagctttttatgccgatggtcctgggtggcggtttagaatggtatcatggcctgatggaagctagcctaacggatggttcgggcgctctgaccctgaccggattcctaggtcaatgggcgctgatggccctcttggacccgcacctcgtgctgacaagtctagcactgcttggactggatgacccgtcagcgggggtcaacgtggtgtgtaacggcctgcgtcgcgatcgggctaatcgtcgccagagggatgcctttctcgtctgggttttaggcgcgacgggcagcggcaaaacggcactgcgtcgtagcctgcttcagcgccctttcgcctcgtcctacgtgccaagcatggaagcgcacctggctatcaattccgttccagtagaaggtcgcgaacgcttcttggtgctcgaggaaattccgacccatggggcgctggaccgggaagcactagccgacgcagagcggttagctcatgtggacgccatttgcctggcctatgatgagagtgatcccgcgtcatttactcacatccaacaactgtatgaagagcagaaaaaggttctgatagggatcccggtacttttgcttgccacaaaatccgatcgtccccacactcagtcgaccgtagatgccgaatggattcatagtcacggcctgcctgagccgattcatgtatctgcgaaggaaatgtcacaggaagaaatgaccacgcgcttgtgggcgccgttactgcgggcagcaatggctggtgaccaaaagaaacgcaacacctggttgctgccggttttaggcgcgacctgtgccataggtgcaacagccgcggtggcgtactattacctgcgcctgcgtaaagaggagaaaagcgattag

SEQ ID NO: 1042 - DNA, 939 bp, Artificial Sequence
  Synthetic Polynucleotide
atgcaccatcatcaccatcatggtggttctggtttacgtactggatggcccgcaggccttcagcacgacacggtgaatttcgttctatctggtgggaacctgctgatactcttgctgggttttcgcattggcaccccactgggctggagcttaagttttgcgctggtcggtttgacctcattctgggcttggtatgccaacctgaagcggtaccgtacagtagcggatacgccgacctcgaggatcgcgtccgccccgcaaggctacgtggaaatcgttggtcgcgggaaacagcctccgggcgagaaattggtcagcccagtgtctggtctgccgtgtctatggtttcgttatcgaattgaacgccgtaatggtgatcgttgggaacatgtcgagagcggcgtatcacatgatacattcggagttgacgatggaagtggcatgctgctcgttgacccggaaggcgcagagattcgcacttcgcgcaaacaggtgtccacccaaggtgggtatcgtagaacggaatggacccttatcgaaggcgagacgctgtatgcgattggcgaacacgtgacccttgggggaccttcggccgtattagataaacgcgcagacttggctaagctgctggccgaatggaaaaccgataaacaggcgctgctcgccagatttgaccgggatagggatggtgaaatttctctggaggaatgggaagctgcacgcaaagcggccagtgatgaggtcgatcgcgctcatctcgatatccgtttagcggacgggatccatctgttgcgaaagccggcacacggacgcccatttctgattgcgaaccgtgaggtggcggcgctggtgcgtcactttcgcctgtggtcctgggcccatttagccataatggctggagcggttagcggcctcatgctattaccccgtctggcttaa

SEQ ID NO: 1043 - DNA, 2310 bp, Artificial Sequence
  Synthetic Polynucleotide
atgcaccatcatcaccatcatggtggttctggtgtcgtagctctcctgttggccgcgtcagcagcgcaaacttcctttgcccagggcgccctgggtctttctcggtatgatgggcatcgagtggttcgtgtggacctgttagatgaaaaacaggtggagttcatgcgcgcactggacgcagatttgtggacccacggagaaggcgtcggtacgaaggagtaccgtgttacaccagcgcagttggaccgcctgcgtgcgtcgggcatcgcttttgaagttaccgtagataatgtgcaagcgctaattgatgctgaacgcgccagcatactagcccctagagggttactcggttatttcgagagctaccagcgctatgaagatatgaaacaatttgccgacgacctggcgctgaacaacccggatcttgtgagtcgtgtaactgttggccagtcgctggaaggacgcgaaatctttgcagtccgggtgggtgctacctcccagcaaggcgagaaaccggcgattgtcttctcagccatgcagcatgcacgcgaatgggtggcaggagcgacggcactgtatctggcgaatgaattggccgaaggttatggggtcgatccccgtattaccgctgcattagatgcggtggacgtttacattgcgccggtaatcaacccggatggctacgtttggacgtgggatgtcgaacgtctctggcgcaagaatagacgaaacaatgggaacggtactatgggcgtagaccttaatcgtaactttagcgtgggctggggtctgaacggcggaagtagtgcgacctcttctagcgatacgttccgcggcgtcgctccgtttagtgagcccgaatcgaccgccctgagcaattttattgcttcaatcccatcggcacgtgcgcacgttgacctgcattcgttctccgagctcatcctttcaccgtggggctggacagaagatcctaccgatgacgccgcggccttcgatgtgctgaatgatgcgttacaggacgctattgccggtgttaacggacgagtctatacggctggtccagcaggatctaccctgtacatcgcgagcgggactgcaccggattggagttatggggatcggggtatttttggctggactattgagctccgtccggcctcaagcgctcaaggtggctttatactgccacctgaccagattatcccgacaggggacgagatcctaccggccttattagaactagccgaatttgcctccgaggatgtgttcttctacggtctgcgcgagccgggctacgttgactccgccaatggagcggaagtggtgcttggcgccacgattgcgcccgcagcgaccctggatgcagcacagcgcgcattacgctatcgtgtaggtgacagcggtccttttcaatcagcgcccctgacctttggcgcgatgaacgaagtacgggggaccctgccgggcggcccgtgtgcgcaggtcttccagtactatatagaaatcgctacggacaacggtgtcgcgttgtttccagagggtggcgctagtgcccctttgaccgctactgtattcgatgccaatgttgcgttcgatgatgattttgctacggatttaggctggggcgtgggagcacccagtgacgcggctaccaccggggaatggacacgtggtgtaccgaacgcaacaaattttcaaccaggctccggggatccaaacggtagcggagcggaatgcttctacaccggttttagcccgccgggcgccattgatggttcggaagacattgatggcggtgccactaccctgacttcgccggtgtttgacgctacgcaaggggacggagatggagatgcagcactgtcatattcacgctggctgggttctaacggcgtaccaggcaatgactaccttcgtacctttctctctaacaacaatggtgctacgtgggtggaagtggatgtgttgtttgaagatattcgtcgctgggaacgtagggagatccgcattgcagattttatgacgcctacatcccagatgagggtccgcttcgttgccgcggatgcgggcagcccgtctgttgcggaagccgccgttgacgatgtccgtatcatcactctgggctgcgcttcggtgcccggcgatacaaacggtgatggggtggtgaacttcgtcgatcttaatgcagtgttaagctcctttggttctagtggtgctccgggtttcgcgccaggtgatgttgatgccgatggcgacgtcgacttcgcggacctgaataccgtgctgagcaatttcggtgctatgaactaa

SEQ ID NO: 1044 - DNA, 603 bp, Artificial Sequence
  Synthetic Polynucleotide
atgcaccatcatcaccatcatggtggttctggttttgcgtgcacttcatcttgttgcggcgcttcctgtccgatcgtggttgacgtcacgggtaatggattccatttaacagatatggcccacggggtatattttgatttcaacaacgacggtcggaatgagacgacctcgtgggcagcgcgcggcagtgatgatgcgatactggtgcttgaccgtaacggcaatggtaccattgacgcaggaagggaactgtttggcaacgctgccccccaaccaagctcgagcgatccgaatggcttcattgcgctcgcggaatacgataaacgcgccaacgggggcaatggtgatggtcgtattaaccgccgagacgctatctttgttagtctaagattgtggcaggattcaaatcataacggtatctctgaacctgccgagctgcacaccctgagctctctgggtattgaagcaatggatttagattataagatcagccgtcgcactgacgagtacggcaatcgttttaaatatcgggcgaaagtatacgactcccatggcaccaacgctgggcgttgggcgtgggatgtgttctttgtctcgcactag

SEQ ID NO: 1045 - DNA, 681 bp, Artificial Sequence
  Synthetic Polynucleotide
atgcaccatcatcaccatcatggtggttctggttggaaggcgggtttgctcgcagctgcgctgactattgggttcgccggagccgcgggcgcacatcctcacgtatttgtcgaatcccgcgctgaggttgtgtttgacgatgcgggtcgtttatcggccgtgcgacatgtttggcagttcgatgaagcgtttacagcattcgcggtgcaaggccttgacgaaaacggcgatggtgagctgtcacgtgaagaattacagccacttgcagaggtcaatgtagaatctctggccgaatatgattttttcacgtttctgcaccataacggtaccgatatagcttttgagccgccgcgggaatactggctggacttctatgggggccgcctgaccctcttctttacgctccccctgagggaaccgcgcgtcgtggacgccagtaccgtcgagctggatgtttttgatcccgcttactttgttgcttttgagatgacccctgaaactccattcgcgctagtgggtgcaccgcaaacgtgtacactggactttacgcctccgccggcgttggatccgcagactgccaccgtattggcagctatcccacagagcgaaagacagctaccgagcgatctgatgcaaatcaccgagacgctgtctaattcggcgcgtattggctgcaaataa

SEQ ID NO: 1046 - DNA, 2118 bp, Artificial Sequence
  Synthetic Polynucleotide
atgcaccatcatcaccatcatggtggttctggtcatcggtgtaggatccctttacacgtcattgtaggtctggggctcacaggcccagccttggcacaggcgcccaacggtattctgcaaggattccagcgcctggacgcgaatggcgatggctgggttaaccgtgatgaacttgacgtgtttccgcgcctgaagagccgtctggctggtgccgatgcggaccgagatggcttactttcccttgaggaatttagacgtggaatgttagcaaccgccgagactgctccggcaggtcaaccggaacctggccgtctgaccccgggggatcatacgcgcgcggtgaaagttggtgatgtcgtacgccgttaccgcgcccacgtgccagcgtcatatgacccggatcgtccaacgccggtggttatcgcgttccatggaggcgggggcaatccggaaagtatggtgcgcctgtcggggttgaacgcgaaagccggtgaggctggctttgtggtcctgtatccttacggtagcggccccgacccggaaagggggctctcgttcaatggtggagaatgctgcggccacgctatggtagagcaggttgacgatgtgggctttacccgcgcaatgttggatgattgggcatctgtcgcaaacctggacgccgatcgtgtgtttgcgactggtctgtcaaatgggggaataatggcacatcaggttgcgagcgaattatctgaacgcattgccgcaatcgcgcccgtcggcggtccgttaatgatgccggcgccgcgggccagtcggcctgtaccggtcatgcactttcatggtaccgccgatgcattcgctccattcaacgggggctatgggcgtggagccacaggcggccgtggtgtgacggactttagatcagtcgagcataccattcaagcgtgggttaaacacaacgggtgtcagccggcgccacgcattgaaaccctgcccgataaagcggacgatggtatgacggttactcggcgtgtttggtccggtggcgaacagggttccgaagtggtcttgatcgaaatcgttggcggcggtcatacctggcctggaatgcaaccactggtagctgcactgggtgagtcgacccgggacgtgagcgccaacgatcttatgtgggagttttttcagcgccacccccgtcgacacggtacagaagcgtcgagcctgagccaaccggatgccggcacgagtgcgattgacccgggatcaccgcgcggcgcgaaggcacagcatgtgtgggtgcttcccgaagttcaagctccacgtctccagagggtcgtctgggattcgcagaccgcaggccagccggtatcttgctacgtgttcactcctgcggcctatgaagtcgaaccagaacgccgcttcccggtgctctactggttacatggctctggaggttcgatgccggcagctgcggcgcaactcgcacagcgctatgatgcagccatgcaagcgggtcgtattcccccaatgctgatggtgttcccgaatggactgccgatgggtatgtggtgtgattggaaagacggctcagtaaaactagagacgctgttttttgaggaactgattcctcatatcgacagaagctttcgcacccaggcacgtcgtgaaggccgattgcttgaaggtttctccatgggtgggtatggcgctgcgcgcctgggttttaaaaggccgcaaatgtttgccgcggtgtccctattcggggccggtcctctgcaactagatttcactgaagctcctcgcgccggcccgcgtggtcgtgaccgtgtcctgggcacagtgtatggaggcgacatggcctactaccaggctcagtcaccgtggcggttggcggagcagaacgcagaacaactacgcaccgggatggcgatacgccaggtgatcggcgatcgcgacgaaacgttgcggtttaatcgtgatttcaagcagcacctggatgctctgcaaattccgcacagttatcgtcagttaccgggcataccgcatgatccaaatctggtcttagacgccctgggtgaggcgcactgggctttttaccgacaagttctcggtaaagtacctgggagcgaaccatga

SEQ ID NO: 1047 - DNA, 1866 bp, Artificial Sequence
  Synthetic Polynucleotide
atgcaccatcatcaccatcatggtggttctggtcgtgccgcacgcgctagtgcggcgatagccctcctatgccttaccacaagccaactgacggcccagcgggaatcaggcccgggtgggtgggtacgcaggatggatggaatcccagtcagagactcggcaggccaggcgctggctgctccctggttaggtggctttaatctgcctcgtccgcagttggtggatctggacaactctgggcgagttgatctgttcgtgcaagagactcgcgatcagttgatgcactttacccgtgatgacggtggctggcgtttacaagatgaccagttccaggaactgccggttggcgaatggtttcgcttcgcggacttgaacggtgatggacgcattgacttactggccgagtcccccaccggttacatccgagcatggcgtaatgatagcactgcggaaggtacgagatttacgccggtcgtggattcgctccgcgatgtacatgggcaaccgatttttgcggatccccagaatattctcaccgttgtggacatcgattgtaacggccgtctggacctgttcattggccgcgtggccggatatatagacaggtatgaacaagttggccgtgatgctcacggcttcccgatctttgatttgttcgaggaacgttggcaggacattgaggtcctgggccctattccagggcagactacccctttcgaaggtgcaccgacaatgcggcatggcgccaacaccatggcgtttggtgacatcgatggtgatggggaccttgatttattttggggcgattttttcgaagcagggctgctgctaatccgcaatgacggtacgtcgtgcgcgcgcccgtccctgcgtggtccgcatgaacgctttccattaggcgccgaactgctgactagcggttacaacgcaccgtctttgggggatattgatggcgatggccgtctggatttggtaatgggagtgatcggtggggcctatcagccggcgcgcaccgcaattgataatctctatctactgacgcaacctgcggcagacagtttccatttggtcacccggcgtctgattactatgattgatgttggtagcgaaagcgtgcctgctctagctgatcttgatggcgatggtgacaccgacctgttactggcgaacaaaatagccccaggggaagattcaaccgcgacgatcacctggtttgagaatataggaacagcaacagccccggtcctggccgaccgaggcctccttccgattcgcggcagtttccactgggcgccagcggtggtagatttagacggggatggtttgctcgatctggttctgggaacgtggaccgaccgcgttcagtggtggcgtaacgttggtacccgcactgctccctcttggcagctggcagacacggcccttgtgacactcacccgtggctcaaacacaaccccgaccctggctgatctggatggagatggactgttagacatgatcgtcggcgaggccagcggtcaacttaatctgtaccgaaacgtgggtacggctcaggcgccttcattcgatctcgtctccgataatttcggcgatattgacgtaggcaggcgtagtgcgccgctgctagcagatttggagggccgcggacgtgccgacttactggtcggggcggaagatggtaccgtgcggctgtggcgccgtgtcggggatcccggggaaatccgatttgtggccgaccctgattttctgctcgtaggcgaccagaacgcgacgcctgcattaggatctctttttggcgctggttctatcgatcttctgctgggcgggtccggcgggggtcttcgctggttccaccgagcgccgtaa

SEQ ID NO: 1048 - DNA, 558 bp, Artificial Sequence
  Synthetic Polynucleotide
atgcaccatcatcaccatcatggtggttctggtaagaccattccttgcatacttctcgcaatcttagctggcggagccgcgatggcggaggaagcaaaacccaaaccagaacgcggggaacgtaaaattccgccggccttgctaaaagagtttgacaaggatgcggatggtaaactgagtccggaagagcgggatgtaatgcgtgcggctatggaagaacgcaggaaagcccgacaagaagctatgctgaagcgtttcgacgcggatggtaacggcgagctgagcccggaagaacgcaaaacaggctttgaaacgatccgcaaagagatgctggaaaaatatgacgcgaataaagatggtaagctggatcctgaggagcggaaaaccatggccgaagccgaacgtgacaaccccttggcaccgccagcgatgggtggcccggacggcccacgcggaaaagggggtcatggcggccctcgtggtaaagggggcccgggcgggaagagaggtccgggaggccccgcaggtccaggaccggatgcaccgcctgctgagtga

SEQ ID NO: 1049 - DNA, 933 bp, Artificial Sequence
  Synthetic Polynucleotide
atgcaccatcatcaccatcatggtggttctggtttagtccgtcttcgacgcgatgctgccaatattgcgctcccggcagcgcaattggccatcgttgcagcggccctggccaccgacacagcgtggggtactcttgctgcggtggcaatgttgatggggaccggcctgtggggatggctgcgctccttacgtcacgcccgcctgatactggatacgcccacgtcgagaattgcttctgctgcacagggttacaccgagctgcggggccgtggccgcccattagccggcacgccgctgctgagtcctgtaaacggtttgccggtcctctggtatcgtttggtgacccatcggaagcagtcagatggcaaatggcgtctgatcgaccgccatgaaagcgacgcgagctttgttctcgatgatggatcgggtcactgcgcggtggatcccgaaggggcggaaatgctagtccgccgtagggatgttttcaaccgtggtgacgtacgccatactcaatggagtctgattgcaggagacagactttatgtgatcggcgactttgccacattggggtcaattgcaccggagttcgatggcgcagcgcaggttagggaactgttagccgcttggaaagcggatcgccgtgaactcctggcgcgctttgacctggatggtaatggggagattgatatccgtgaatgggagctggcacgtgcccaggcgaaaagagaagttcggcgccaacgccgcgcggtcctgagcgctccagaagcccacgtgatgcgtcggccggccctccgtcgcctatacttgatctccgacctggatcctgcgcgcctggctgcacgttataggttatgggcgggcttccatctggcagtatttcttggctctgctggagcagctgcgtggtttgagcagattggtctattctaa

SEQ ID NO: 1050 - DNA, 864 bp, Artificial Sequence
  Synthetic Polynucleotide
atgcaccatcatcaccatcatggtggttctggtggtttagctggcgggggcgcaatcgcgctgacagtggccctttcaggagtagttgcggctgccaccgtcctgagcgcattgtccgcaccggcgcccactgcgccggtggttgatacgtctaaaacctttgaggacctggatggtaatggggtggatgacgattgtcaaacggacgccgtcgttgcggatcctgtagctgccgcctcggcagaagcggctgtggatctcaacggcgatggtaccattagtgtaagcgaagcggcccagtcagaccgcacaggcggagttaactgcaatcatggtggctatgtcagtggggtggcacacggtagctgcaccgatgctccagcgccggcagacactactacggaccccaccgcaggcaccggtacggcggatggcgacaccgaggatggggattcggcggatgacacaggcactaccgaaggaacggaacctgctgacgccccggaatctgggacaacctgtgctgatactacgcaggcgaccgatgccccaacaacctgcgatacgtccacgaccgatggcactaccacggatggaaccacagcgacaaccgacgccccgacgaccgacgtgacaaccccgactgatgtcagcccgaacgcccatggtaaggcagtagcagctgttgcccaatccgatgccgtgggcggtaaaaattgcaaccacggcggtgcggtcagcgaggtggcgaaaaatcatgacgcacgtgatgctgccaaggcggcgcgagaagcagcgcgggaagcccgtcgcgcggcgagggaggcagcgcgctcagctaaacaccatggccgaccagggtag

SEQ ID NO: 1051 - DNA, 342 bp, Artificial Sequence
  Synthetic Polynucleotide
atgcaccatcatcaccatcatggtggttctggtaatacccaaactttcccgtccacactgttagcgctctcgttgacggtagcccttgggaccatggcaacctcaacgggtgctcgagcggagcaggatcctagtggactgtctgcatttgacaaaaacaaggatggcatgatcagcaaagaagaatatatgagcacaggtggcaccgataaaacgtttgacatgtacgatctgaacggcgatggtaaactggacaagactgagttcggtaaagccaaagggggagaaaccggcgcgccaaaaggcggcgaacccggcggggccccgatgccgacgcgttag

SEQ ID NO: 1052 - DNA, 1443 bp, Artificial Sequence
  Synthetic Polynucleotide
atgcaccatcatcaccatcatggtggttctggtacccacaaaacgttggtggccggtccgatgctggcgatcgtaggccttacaataactaccccctgggctttagcacagtgcgaaccagcgtgggacccggccattggaaaccctggggtcagcacgggcttcgttcaaccgatgcgcccttgggatgatgggactggtacccgactgtacgcaggcggttcttttaattcaatcggcggtgcgtcggggagtaccattctgggtcagtgggaccgtgataccaacacgtggtcccgcgtgggcacaccgggcctcagcaccggttctactaatggctttgtaacgcaaattgtcccattcgaggtttttggccaggaacggctagtggtggctggattctttgccaacgcgggtgctttagcgggcacgcagagcatcgcagcctgggacggctcagcgtgggtttcgatgggtgcgcaactggtcgctccgaatgccttctggggtagtgatgttggcgatctgggggaaggtccacgcctctttatgggcgggtctttcccgaccattgcaggcgtacctgcgggaggactggcgcagtgggatggagactcctgggatgccatcggaaccggtgtggggattagtggtgcgggcagcccaaacgtgtttgggcttaagctgtttgatgatgggagtggcttggcactgtatgccggcggtagattctctgcaattgacggtgctgcgaatacagatctaatcgctaggtttcgtgagggagcgtgggaagccgttggcaccggcctgggggcaagctcgcctacggctgacgcaggcgtcatggaagtatttgatgacggtaccgggccggccctgtatgcggcgggccgctcgttagtcgccccgggccagcccacagcatcggtgtacaaatgggatggttccgcttggacggcggtcgggcaagccctgggcggtgcggtgacagacttgcttgtgtgggacgatggtaccggtccagcgttgtatttagctggtacggctatgccgggcatcagatatattgcgcgtttggaagcaggtcagtgggccactgtagacggcggaatcgagcccgaaccgagcgtttcagggtcaggattcgcctcagcgtttggcctagccgtctgggataacgacctgtacataggagggagcttcacgctcgtgggcgatccgatggttggtgttcgtggcattatccgccgtaccgggtgtgggagtgcgccgtgctttgcagatttcgacggtgatggtgagctgaccttgtttgattttctcggcttccagaacgctttcggcaccggtgatctggctgcggactgtgatggtgatggggaactgactcttttcgactttctgtgcttccagaatgcctttgctgccggctgtggttaa

SEQ ID NO: 1053 - DNA, 519 bp, Artificial Sequence
  Synthetic Polynucleotide
atgcaccatcatcaccatcatggtggttctggtggtcgtaagaatcacatcttacgccctatttttgcaccgttcgatccggaaaacgggaacatacggttttcaactgtgggatcgagtattggcgttggcagcatgaaaaatatgaaactgtacgtccttggtacggtactcgtctccgcgctgtctgtgcccgttagtgtgcgtgctgaggacgttgcggggaaagccgccaacgatgcaatgaaacgaccaccggctggcgaacgcatgatcgaagcgctggataccgacaagagcggcgatgtaagcttggaggaatttcaggcgaaacatgccgaacaattcaaaacaatggacgccaacaatgatggtaaactaaccaaggatgagattggaaaagcacatgaagcgcgcaaggccaaaatgaaggaacacatgcaggagaaacgtgaaagattaaaagataaagctgagaaagaaacggcaccggcggaagaagctccgaaagccgagtaa

SEQ ID NO: 1054 - DNA, 1755 bp, Artificial Sequence
  Synthetic Polynucleotide
atgcaccatcatcaccatcatggtggttctggtaagaataaaactagcctcttcttgtctaaccccaaaaagaactttctgcgttcctactcacgcgcgtttaaacagaatattaaaataaaagttttacttttcctgattatctgtttttgcatcgtagggattacaagtaccaaagtgacctcgcaagacgaggaagaaatcattgtgcataaaaagtatccgagcgagccagtcgaactggtttcaattaaaacggaacggaaccagatcagttttgaacaacctttcgcccgatcggaagagtggtataaaggcctacagttcgagattaaaaatatcagcaagaaaaacatttcttttatcagcatcgatctgatatttcgccgtccgaaaggtatcacgccgtctcgttcggatttctccaccctgccttacggaatcgtcctgccgtttggcgaaaagaatgtgagtttagcagaaggtaaatcaagcattcagattaaaccaaaccgcacttccgttttgcaagtcgctgaggcgtattaccacacgttgaaagatgaccttaaggatctgggctatccgaatggtttcaaaggcgtggaagttgaaataagagaaattggattttccgacgggaccttttgggcccgtggtatctggtacaaacccgatccgcagaaccctaacaaactggtagaggacaaaaatattaaagtagatacgaaaatctcgtcattaaacccggaaggcctggtgtgcggaacccgccgcattgacttctctccagattattgttaccagccgctcgattgccaagtagatacagagcatattgatgaaggtctgccgacgcttttcgctgaagagtatataatccgtggctgtaccatccgatcaggcccaatgcagggttggggttgcggcgaacaacgtgcgaccacacgcgtgattgcctgtcccactccgacccctacgccgacaccgaccccggcacctacccctactccgcagagcggtgggtgcaacgggaggccagattttaggcagtatccatcaggctgtgcgcccggcttcacagcgaacgggggaacctgcacccgctcgccgagctttattgaccagtgtgacctgtttggtggctatgattttgatagttgcggttgttttggtttttgcgatccaagcattggtggatgttccccggtcgtggtcgacattctgggcaatggattcgcaatgactagcgcgtccggtggggtgatgttcgatctacaagggtccggcacggcccgtcaattctcttggatcgcagccgacagcgatgaagcatggttagccttagaccgcaataataacggcgctattgatagcgggcgtgagctgttcggcaacgttactccacagccgcccccgccggacggggcggaaatgaatggtttcctggcgttagcccaatatgatacggcgggttttggcggcaatggagacggcaaaatctctcagcaggatgcaattttctcccgcttgcggctgtggcaggatgcgaaccacaatggagtctcggaatcgtgcgaactttttaccctaccagagctgggtctgcggaagatcgatctggattaccgcgaaagtcgtcgggttgatcagcatggcaaccagttccgttaccgtgccaaagtaaaagacgctcaagacgctcagctcggacgctgggcttgggacgtttttctggtggtcggcaatgagtga

SEQ ID NO: 1055 - DNA, 915 bp, Artificial Sequence
  Synthetic Polynucleotide
atgcaccatcatcaccatcatggtggttctggtaggagacgatatcgttctcgcgctggccggttcggggcggtgtcagacttgacgccgccccactgtatccgcaagcgcagcccaatgaacctggcaaatgtttttggtcttgccgtcctctccctgccgtgcgcggtactggcccaagaatacgcgtggattaactttgagtcgactcgtgcattagaagcaacagagttcgctagcagtgccgtccgtatgcctgattccctgcgtatagccgctgatgactttctcgtgggagaaccggttcgtctgtctgaagttgtgttctatagtgtctggattgatccgccagtaatccttggtggcgattggtacatttatcagtacgacgaagcgacccgcagcccgggcgcgttggtgatgggtgcttttgatgtcagcctggaaaccaccgactcaggcttagtttcgggtaatttcggcacgatctatcgcaatgccatggcggtcgatgtggagctcgaaccgggtcgatactttctaggatttcgcactcatgtggcacctggggcaggaaaacctgtaaacgcgcccctgcatccggaatggtctaacggggacgcgaccgcccagtggaatttcagcgcgctgaccagtggcgaggtgtttgaagcatggatgccaatgactgattttcacccgacactgaaagagtgggcattcgagctgcatgggacgtctcggacctgccgtgctgatatcgatggcgacggttccttgactctttttgactttctggaatttcaaaacctgttcgcatcgagcgatttacgcgccgatttcgatggcgacggttccctgacgttgttcgattttctcgaatttcagaacgccttcgcggcgggatgtgaatga

SEQ ID NO: 1056 - DNA, 405 bp, Artificial Sequence
  Synthetic Polynucleotide
atgcaccatcatcaccatcatggtggttctggtaacgtcaatagctttaagcagatttcatataaaaagaacatcggtgctgtactggccttgttcatggtgttatccggaactccagtttttgcacaaacggaaggcgggcgaggccctgcgcccggtcttcgcgcaaatccgaacccgagtaattcggcccggaacccggggaatttccgtaactaccaggatagaggaaaccgccaaaataatgaccgtatacgggcggatcgtaacgaggatggccgcgtggaccgcaaagaaaggcatcaggcgcgcgaggttcgtgaagatcagtggatgaaacgtcacccgcaagccgctgaccggctcgatgcaaacaaagatggcgacattgaacgctctgattaa

SEQ ID NO: 1057 - DNA, 438 bp, Artificial Sequence
  Synthetic Polynucleotide
atgcaccatcatcaccatcatggtggttctggtctgcaacataaaaagtcaacagcaattatagcgtttggggtccttttcatctttactttgtcgacggctcccgtaattgcccacggacctggccatgacgataatgataaccactgcgaacattgtgagaaaaagatcaccaaaatggacagtgatggtgatggcaaagtgtctcgtcgagaatttatgaaattccatggtgacaaatttgataaacacgatctcaacaatgatcggttcttagacgcggacgaaattcattacatgatggaggatatgcacaagcagatgcgtgaacatatgcacgatgacgatcacaaacatgacaacaaccatgagaatggccacagccacgataatgataacgataatcattcccatgaacacaaccacgaccatgactga

SEQ ID NO: 1058 - DNA, 636 bp, Artificial Sequence
  Synthetic Polynucleotide
atgcaccatcatcaccatcatggtggttctggttcgcctcgcagtgctaagcaatttaatgagatccggattcagaaaaaacagctcataatggaaacagccctggaactattcagcgagaacgggtttcacgcaacgtctatgtcacaaatcgcgaaaaaggcgggtatttccaaaggactggcatacaactatttccagagcaaaaatgaaattcttgccgacatcttagaaacttcgtcaaacgaaatttatgagaatatagatatcaaccatgatggcattctgaccgaagaggaattttactattttatcaaaaagaccttccagttgattaattccaaccgtcgtttctggaaactgtatacgagcgtgattctgcaaaccaatatccttgacgaaaagaacaaaagcatggcggaaaaattgtctcccgtttttaatctatttaggaactttctgattagtaaaggtagtaaggatccagatggcgacttaattgtcatatctacccttctgaaaggtgcttccatcatcatgatttcgactgaattttacagctacgagattctggaagaaaaaattatctctgcggtacagcgaatcatcctgtataacaaagagacggagaagtaa

SEQ ID NO: 1059 - DNA, 621 bp, Artificial Sequence
  Synthetic Polynucleotide
atgcaccatcatcaccatcatggtggttctggtacctcaatctcctctcctgtctcgggggcaagcgcttatagtacaagcctctgttaccttgacacgaatggcgatggtgtagtgtctgcggatgaggttgccaccgtgtcagaaagcaaaagaactcaagacccaacggttgaaaacgaaaacgcggccaccggagtcagctcgcaggtaaccggtggcgtgatggcaatgctgttagcgggctccgaggatgggggttttgaagagaagcccagtccgaaagaattgttcgctgccatagacgcggatggtgatggctcggtgacgcaggctgaatatgttgcggcacgaccgggtgacatgtctgaagaggatgccgcagcgctatttgcagaactggacccggaaggaacaggcagcctgtccgaaagtcagttcgtcactgctatggaagccaatcgcaccgtgggcatttcaagtgcggccgaggatgaagatggcgataccgtcagcctgctggacgtgttggcggaaatgcaatcggtgattgccgcataccaggcaaacgccgcgggtgatatcgatgacacggagacgaccgttcgtgcaactgtctaa

SEQ ID NO: 1060 - DNA, 777 bp, Artificial Sequence
  Synthetic Polynucleotide
atgcaccatcatcaccatcatggtggttctggtccacgtacgcggatcggctactcagtgttgcgcactcatagtcgacgcaccaggatgaaacacgcacagatatcggctgccgtatttgcggcgctggcattaagcgccgcgggtcttgcagtcgctcaacccgcggaaaaccgtcgcgttcaggcccaagttgatagactgatggccaatgaccgcaacggggatggcaagctgtcccgcgatgagctccctgctcgtttagcggaccgtctgttcgcagaagctgataccgacgatgatggactgcttacacgtgaagaggtgacggcgcatgtcatgggtgccagaccggccggcgaagacgcgaccccggctcagacagctcagccgggtgcgggtccggagtctggccaccaggcatttgaaggggccatgaaacaagcaggggcgagcatgcgtgccctccgcaggtcgcagttcgcggcatccacccgagacagcgatctggatgcggcacaatcaatgcaggaagctatgattgcagcgaaagcgagttttggctcagtggccatgtccgccgcggcacgtgcccgcttcggtgaagaccaggatgcctatcgtcgggcgtttcgcttggcgatcattgaatctctgcgcgcggcgattgacttggagcaagctgtactagaagaagatcaacctaaagcgcaggctgcccaggcccgtctaatgactacgcagaagaccgcgcatgacctgtttcaagatgagtaa

SEQ ID NO: 1061 - DNA, 450 bp, Artificial Sequence
  Synthetic Polynucleotide
atgcaccatcatcaccatcatggtggttctggtattcgctctttactcgccgctggcatagcagcgagtttgatccttcctgcggcagcccaaggggcgaatgcaggtaggatgattgaacggctacgcgaggccgatggtaacggcgacggagcggttacgcgagctgaatattcagcctggcgtctgcaacagttcgcgcgcatggatcgtgacggcgatgggtacgtcactcaggcggagatcgaccgtattgcacgatttgcacccgcgggatttgaaggtgatcgcatggtgagcatgttcgataaagatggcgacggtcgtgtatcggcccgtgaatttgctgacggcccggccccggcctttgtgcgcgttgatgctaacggtgatggggtggtaacagaagtcgaaatcaccagcgcaattgcgctgctcaaggcgcgttga

SEQ ID NO: 1062 - DNA, 615 bp, Artificial Sequence
  Synthetic Polynucleotide
atgcaccatcatcaccatcatggtggttctggtcttccgcccgtccgtcaggcgggggctgttcggcaaaaccgccgttctgaagagatgcatgtaatgttacgaaatctcatgttgggtgcaaccacgctggcgctgactgcctccctggctggcgtgcctaccgccgcaagagcgcagacagcggccccggcagcagaagcgccaagcggagcctcagctggccaaggtgccatgggccagggtgcgatgatggggaggggcatgatgggacagggttgcccgatgggcgaagctatgggacaaggttgtcccatgatgggccaggggatgggcccgggcatgggtcagggaggtatgatgggcgggcgcggaccaggtgcgggcatggggccgggtgatggcggcatgcgtggccctaacatgatgcgtcttatgttcgcactgatggacgcagatggtgacggtgcgctgtcgatgcaagagtttcaggcggcccacgaacgtatcttcaatgccgcggatggcgatgacgatgggtcgctcacgatggaagagatgcaggggtttatgcatggaagtggcaagccggctcgtaaaatgcgcggtcgctaa

SEQ ID NO: 1063 - DNA, 1398 bp, Artificial Sequence
  Synthetic Polynucleotide
atgcaccatcatcaccatcatggtggttctggtagtttacagcaacgtgtctgtgtggcgggaatcttggccgttctcagcgtaactggctctaatgcagctcccgaccaggcgacaggggatccttgcaaaccagcttgggtgccgacgtttgcgggtccgcttggcctagattcgaccgcaggcgccttcaccatttttgacgatggttcaggcccggccctgtacgttgggggtggctttacgacagcgggaggtgttaccgtaaaccacattgcaaagtgggacggctcctcatggagtcctctgggtgaaggtatgaacgccgatgtgttcgcgcttaccgtcttcgatgacgggactgggccggagctgtatgcaggcggttttttcacgaccgctggcggggtgccggccaatcgcgtggcgacatggaacggcagcacgtggacctctctgggtgaaggcgtcgatggcgtctcgtccttttgggtatatgatttcgctgcctttgatgatggaagcggtccagcgctgtacgttgggggtaattttgacactgcgggtggcctgcctgccagctctatagcgaggtgggacggaaaaacctggtcgccagttgggggcggggtgtctggaggcacaggaggtgaaatccgtgcactgacggtctatgatgacggctcaggcccggctctctatgcaggcggcagcttcacgttagccggtgaggcaaccgtcaaccgcgtagcaaaatgggatggcaatgcatggagcagtttggcgggtggcatgaacgaacgcgttcgggccctggcggtgtttgatgatgggtccggtgcggcgctgtacgccggcggggattttattcaggccggtggcgtggccgcgagcaaaatagcgaagtggaatggtaacgcttggtcgtctctgggcggagccaccacgaacgtggttcgtacatttggtgtgttcgacgacggttcgggtgacactttatatgctggcggcgggttcgatatgatcggcggtgcgtctgcaaatgggatcgctaaatgggaaggctccacctggaccgcgctgggctccggaattgtagggtacgtgggtgcacttgcaggctttgatgacgccctggtcgtaggcggtttcttcacctttgccggtggccaaccagcgaaccgaattgcggagtggcgcggctgcgcggcgagcgcaccgtgtgctggcgataccaacggtgatggagtagttaacttcacggatctaaatgctgttcttacgtcgtttggtcagagtgtgccgccgggaacaggcggtgatgtcaatgacgatggtgtggtcgacttttccgatttaaatgaagttttggcgaattttggcgtagaatgccgttag

SEQ ID NO: 1064 - DNA, 660 bp, Artificial Sequence
  Synthetic Polynucleotide
atgcaccatcatcaccatcatggtggttctggtgaaggggtgtggggccgcgagggtagagtccccactacgcgacaacggctcccagtttttcgcgctacattctctcctcgcagcttgcttgacttagatcagggaaccgaacgttacgaagtaccgtccctaggcctgtcaaccgcctcgaaggtggaggcaatcgtggcgatacgtctgccggcgtttgtagcagcgacgggtctgaccgatccaagtttggttgcccgctatctggaagcagaccttaatggcagcggtaaactgtcattcgatgaactcaaaatttttcagggaaaaacgtatcgtgagtttaagtacggcgcgaacgaaaccgctttacgtccggatgaatttctacgtgccatgggtggggattgcgaggacttcgcactgtatactgctggcctgctgcgcttctggggctgggaaccgtacttgggaagcctgggttctgcccgaggcggtgtcggccacgcggtgtgtctgagttatgaggaaggttccttctcgagtggctatacctactttgaagttgaatctgggacgactgaggatggtgccggacttaaaccagggaccgacgtccccattgattacgatcatgtaggcggcctcaggatgtga

SEQ ID NO: 1065 - DNA, 1077 bp, Artificial Sequence
  Synthetic Polynucleotide
atgcaccatcatcaccatcatggtggttctggtattgaactcgatatgctggcttacataaaatcattgttcggagacgtggatggggacggcgaggtcactctgatggatgtagttgccattgcggcaaatgcaggcgcggcctctggttccttacctggtccgctgcaaggcgaccttaaccaggatggtgtcgttgatgcgagcgatgtgctggctgcctatagtgcgttaggctcgacggtgccctttacacaggaagacgcatggtttctgtggaaccaaatcgtattcgaaggggttgcagcgggttatgatccgagcatcgacgagattctcattgatccgctgcgtggaatggtcggcggtcatcgcggaccaaatgaccacaaccagcagatcaccggcacctggccaccgatcccgggctaccccccgggagaatggaactggccctcggatcatctaggtacggtgagccaatcctgggggaatcgacctggccagtcaacctggcctgccaatcactttggttctgttagtgcgactcgtgaaaacgcgaccaatcgcgaagattattggccgccaaaccatgacgtgaccaggagcggcttgtggaatacagatggcctgcaccagagtcttacgtcgagccaatggccggctgggcatctgcgcgaccggtcaattgccggccaggattcggatcagcatgtacaggtcatcagcaacgtaaaccagggtaataacaccgatacctccgagttggccggttggccgccgaatcacattgctccggtgagtcgtacgtggacacccgaccatgaacgcgatcgttctgcgatgtggccggcaaaccacctgatgaccatctcacaatcctggacgaatccaaactctggttggccggctaaccattacgaggttatatctgtgacttggagccagccaggcgaccactccacacgggtgagtattctcttccaccctgccaatccttttcgcctgccggacctcttccgacagagtgcaactccggacgatatgattaatctactggggtttgaaccccgttaa

SEQ ID NO: 1066 - DNA, 348 bp, Artificial Sequence
  Synthetic Polynucleotide
atgcaccatcatcaccatcatggtggttctggtcagaaaaagttgtgccaagatagtaaatacaataaatatgacgcagatcgggacggcactgtgaacgatgaggaaataaacaatgcgcaggaaatgctcgagcttgaattaagggaagaaaaagccgatgctcaccgtcgtatggcatgggtcgccattatttctatgatcatctttacagcggttctgttctcaccaattgtgagcgaatcgcgagtagccgcgctggctgatctattgggacttttctatatcgcgcaagcaagcattgtcggggcctttatgggtgttaccgcgtggatgtcccgcaagtag

SEQ ID NO: 1067 - DNA, 888 bp, Artificial Sequence
  Synthetic Polynucleotide
atgcaccatcatcaccatcatggtggttctggtcagcgtaatacacatcgcaagcaccaaggtgaaacgtccatgaaccgattagcatggaccctcttgaccctagccactgcgacgcccgctttcgcgcagattcttgtctatgatgagaactctataaatcaacatgcgctgcgggccgcagaacgtgttcgcccgggcgaggtgacccgcgctagacagacagactttaacacgctgttagcacgtgggggatgggaagtagttgtgatggattttccttcaatccgtccggatggcggtaccgcggccttcgcagaatttgtcaacgcgggcggtcgcgccgtgctgagtacttggttctcggtatacgacgacgtgttgtttaatgcgttcggagctgccggcggggaagatatgtttttctttgatgagccaatggaaagcgcaggcacccctctggctgatagggttttcgaaggtgtaccgatgccgtggtttgactggctgaacgcgtggtttagcgatggagcagcatttaccacgctgccgggcactgagcccttagcgttcgtagccccgttcacgaatccaattatgatctatgccaatgaaggtcggactattgcggccccagttctggacgaaatggatgggtccaccgaggcggagcggatctgggaaaacatgatgaacctcgtcttggaagcaggtcaggactgtccggcggatatcgacggcgatggtcagctgaccatttttgattttcttgagttccaaaatctctttgccgcgatggacccgcgcgccgattttgatggcgatgggagcctgacgatttttgactttctggaatttcaaaatgctttcgcacagggttgcgagtaa

SEQ ID NO: 1068 - DNA, 375 bp, Artificial Sequence
  Synthetic Polynucleotide
atgcaccatcatcaccatcatggtggttctggtcattggccggtcgctttgactgggttctttgcgacgcaaggaggccacatgacacaggcacagcatacccaccgatttgacgcccgctcactccttttactgggcgcgctaaccctggcatctggtgccggttgggcgcaaggcaacccagctcctgatgatgcatcgagccaggcccttgtggcggcgttcgccaaagcggaccgtgatggagacggtaagctgtccactgccgaagctgcccagctgcccgctgtagcagagagatttgcgcaactcgataaagatggggatggcgccctgagccgtaccgaatttatgacgggtctgcaaagtaattaa

SEQ ID NO: 1069 - DNA, 348 bp, Artificial Sequence
  Synthetic Polynucleotide
atgcaccatcatcaccatcatggtggttctggtaaacctcttaacctcgcaacagccttagtgacgaccaccctatgcgcgatcggattggctactggcgcgctggcttcagatccggccgggggtgcgacgaccgacccagtagaacgttaccgagcgattttcgcacaactggatacggatggtagtcagtcgttatccgaggaagaagccgctagcgcgggcctgcaaggcgagtcttttgcacggcttgacagcaatggggaccgcaccctggtcctagaggaatttctggcgttggccgccgaagcagaaagcccgtcggtgattcccactccggatacgtga

SEQ ID NO: 1070 - DNA, 804 bp, Artificial Sequence
  Synthetic Polynucleotide
atgcaccatcatcaccatcatggtggttctggtatcgacgcgctatccccgagccctcccccaggtcagtctcgccaaccgagtgcagatccgtcaacagaggctagcctccgacagtcgcgtgattatcagattctgcgccgtaccttgcggatagaagatcaaccaccggaacctctggcccgtccggactcagagccgtctgaagatagccttacggtacccactaccacggaagtggcgcgctttgaacaggtcttacaacagcgggagctgtctgttcaaattggggcgccttcccaggcccagccccagctgagtgacccgctgaccctcgatttagcaggagatggcttcactacacgtggcctgcaacgcgctgtgttatttgacctgaatgccgatggtcgccttgaccaggtttcgatgccggatcgttacgacgcgcttttggcgctggatagaaacggcaacggtagaatcgatgatggcaaggaactgttcggcgatcagaatggagccgcaaacggttttgccgaactcgcacgacacgacgacaacggggacggtcgcattgatgcttcggacgcgatttatcgtcaactgaccctgttgcgctttgatgaacaagggaggcagcaggtacgtagcttagcagacgccggcgttagcgccatacgcctacaagctcgtgatgtggatctggcactgggtgcttacgatcgcgtcgcgcagctttctagcttcgagtttgaggatggccggcaaggacaggcggcggatctcttgctggcgcatcgctag

SEQ ID NO: 1071 - DNA, 615 bp, Artificial Sequence
  Synthetic Polynucleotide
atgcaccatcatcaccatcatggtggttctggtcaacgcagcctggcatttgccgctctcgttccagcgcttgcattgtcatctgtcgcccaggcgcaggcttggacacaattccagtttggcggggtaggttccgtgacgaccttcggaatcaatgtgaccgatgcgtttcccactttacagataacggacgcgttcctgagtggtgatcaatttgcagttcgtgtgctgatgggcggctcggtcgttagcgaatttgacactagcgtacctacatcccagggtgattctgccattgatttcgacatggcctttgccgatgatcggtggtcatcgggagagcaattcctgagcgcgcgaggcaccatgaccgtcgaagtgacggttaccctcagtccgtttggggcgggtggcgcaggctggcgtctggtggagggtgaaccgccgtgtcgcgcggatatcgacggtgacggacagttaaccctgttcgattttttggaatttcagaacctgtttgcggctttggaccttcgtgccgatttcgacggcgatgggcaactgactttattcgatttcctggaatttcagaacgagtttgcggccggctgcgaatga

SEQ ID NO: 1072 - DNA, 1056 bp, Artificial Sequence
  Synthetic Polynucleotide
atgcaccatcatcaccatcatggtggttctggtaataacgaccgtaaacttgatttggttgtaacttgtggtcgggcgcgctcgataacagtgctcgagggaaaggggaacggccaatttggtaccgcactaagtaatacgacgttagcccagccgcctggcgaaatcgctattggggatctgaacggcgacggtaaactggatgtcgtggtcgcgagccacgactcatatggtctgaccctgctgaccggcgatgggaaaggaggccttgccgttgcacccgcgtccccgatcgtgatgcgcctgggcgaacatccacatacgcacggactggcagtagtcgatattaatcgtgattctaaaccggacttgattacctgcaacagcacagacaatgatatctcgattgcgttcggtgatggccgaggtaactttactcgtgctccgcagtcttacccagttggacctagcccgtatccgttcgccgtgggcgacgtcaataacgatggttggcccgacattgttgcgaccaacaccgctacaggacctttacgcagacaacagttgccgtttagtcgcgcccttacgctgctactgtcagatggcaagggcggtttctccccacgtcagctgccgatcaggacgtctgaaccgtggtttgcggcgattgcagatctcaatcgcgatggcaaagccgacatcgtggctacccatcacgagcagagcgctctgactgtgatgattggtgatggtcgtggcgcgtttacggaagccaacggttccccattcgattttggggtcgcagtataccatcttattatagccgacctcgatagagacgcggctatggacgtagtggcaaccacgggtaataacatccgcgccctgttaggggatggacgtggcgcgttcaaacccgcagctagtgttccggttggcccaggcgcgtggcgcatggcggctgccgatctgaacaacgatggtgccattgatcttgtgaccagcaatagtgactcgaactcagtgagcgtactgctcggcgcatctaagcgttga

SEQ ID NO: 1073 - DNA, 333 bp, Artificial Sequence
  Synthetic Polynucleotide
atgcaccatcatcaccatcatggtggttctggtggaagtggtcaacaggcacgtgtcgatgaatcggcggggaggctccggggctacgcctggggcgagaatatcggttggataaacctagacgatgctcaggtgtttgttggtttcgcggcccaatgccccggcgatacgaacggagacggggtagtgaatttcactgatctgaacgcggttctgtccacctttgggatttctggcgccccaggttttaccggcgcagaccttaacggtgatggcgtagtgaatttcacagatttgaacatcgtcctgtcaaattttggaaacgcttgttaa

SEQ ID NO: 1074 - DNA, 342 bp, Artificial Sequence
  Synthetic Polynucleotide
atgcaccatcatcaccatcatggtggttctggtgagatcctgctcgcgattgtggtcgtagttgtggtcggcgcattaatttatttcaatcgctcgagcaagtctttggacgttaacaacgatggtaaagtggatgccgctgatgtaaaagctgccgttcaaaatgtggtggaaggagtcacagcgactgttgacgtaaacaaagatggcaaaatcgacgcagcggatgtcaaaatagtgacgcagaaggtcaaaacccaggtgaaaaaggcagcggttaaagccaagaccgccgcgaacaaagcatcaacgcgtaaaccccgacaaccaaaagctaaatga

SEQ ID NO: 1075 - DNA, 1716 bp, Artificial Sequence
  Synthetic Polynucleotide
atgcaccatcatcaccatcatggtggttctggtcccaagcacactagccgaatatttttccctgcgctgctcgccgcacttatctttgtaatgcattgtatgctaccaccggtggggtccgcgcaaaccggacgcattgcattcttgccgtttaaagctaacgccccgcaggacatgagttacctgacgaatggtattagagatatgttagcgtcgcgtctggcttctgaggtcggcctgacagttatcgataaaaccaccgttgataaagccttaacgtcatccggcactccaacgcagaccgaagcatttattaaattggcgaagacactgcaagcagactatatcgtggcgggtagcctgaccagcttgggcacgtcactgtctctcgatgctaaattcattgatgtagccaaaggtgaaccgcgtaacttttatgcgactgctaagaccgaatcggagattatacagtctatcgacagtctggcctgggacatcagcgaaaaagtcttcgcgcataaacggcctgcaaccgctctggtgcagccgcaagcgccggggcagcccggcgcccaagcgcagccacagtacgcaacggcacacccggatcgcgcgttcgccggccgtacaggtgcaggaggaggtagtccttttatttatcccaaagggatcacctctgaatttcagaaaactcagaatatgaagctgtcacttcagttcatggaaatggccgatcttgatggcgatggtaaagaagaggtgatatttgcggacattgacgcggtacaaattttcaagcgcgacaacaatcgactaagcaaagttggccaaattccgggcaaagtcggataccgcatccatgctatcaccgtggccgatctgaacaaaaacggtaaaccggagatttatgtctccgcagcggactcgaaacaaccgcattcgttcgcgtttgaatggctggggacggataaagcaaattacctatttcaggaccagcgttggtatgttagagctatgccaattcccggtgaggggatggttttagccggccagcgcgccgccagcgataaagcggtgtccccgggcataaatcgtttagaattgatcagtggagaactgaaagctggcagtccgattgaggtgcctgcgaacgtcaacctgttcgaatttactatagcggatctggacaatgatggtagccgcgaaatcatcgcgattgacgagtatgataggcttagggtgcttcgctcgtctggtacggttttatggaaatctgacgaattttacggcggtactacgcgtttcattggtggcaccgatgcattcggcgccgctcgtacctcaaacctcgaaagcagtacgcgcatctatattccgagtcgtatcattgcctacgatgtgaatggggacggacagcaggatatcattatcaataagaacctgagcaccagctcacggctgtttgaaaatatgaagaactatcctagcggagagattcacgccctctcatggaatgggctggctttatcggagctatggcgcacccggaaaatcgatggctatatcgtcgactacctgctgcgtccaaacgcagacaagaaaagcgcggaactcttggttggtctgattgtatcctcgtcgtcattggatatgtttgcggaccaaactagcaccatgctgatttatcagctcgattttacaaagaaagctgaataa

SEQ ID NO: 1076 - DNA, 846 bp, Artificial Sequence
  Synthetic Polynucleotide
atgcaccatcatcaccatcatggtggttctggtggtcccattgagatgacagcagaattggaaaacatcatgaaacgattcccgcttgccctggcggctgcgttagtcctcccagccgtactggggctagcagttgctgcacatgcggcgtccgacgccccggctgcgcctcgggcgggcttttcaggaccgtacgccggctatggtatgggcccgggtatggggatgggcccaggcggtactgggtggcaaagcatgggtccgggtgcccgtagtggcgcatggcgcggagcctactgggcggatgcagatcgtgacggcaccctgacggtggaagaggtgaagtcttttctggaagttcgccacaatcgtccaggattcgaaaacttaaaagtaggcgcggtcgaggagaaagatgacgctaccctaacggcggaaatagtgaccgctgaaggcgcactggtcagaaccctggaatttccgcgcaaagttgatgcgggtgtgacggcccctcgtgggcgcgggggccacggcccggctatgaggggtgggagaggtggatggggccagggttatggccctgctcgaagcgcgaagttcgatggtcgtggatttggcccaggtatgcgcgccggccttctggcagacggggagttgtcggtggatgaagtaaaaggcttgatggatcgtcatctggccatgtggaataacccgaatctgaaagttggcgatgtgaaagagaaggacgccgcaatcatttccgcggagattgtaacaaaagatggttcgctcgttgaaagccttgaatttgatcgcaaaaccggtttccgggtctttccccgttaa

SEQ ID NO: 1077 - DNA, 2670 bp, Artificial Sequence
  Synthetic Polynucleotide
atgcaccatcatcaccatcatggtggttctggtcgcactctcgcgcgtgccttcgtaccatcaatgacggctgcatctctgtttatcgcgtgcgggcacgccgccgcagcgcctcttcgaacagcgatggctgacgcgcaagctttgaccgcaaccggattatccggtatggcccagagtgtgcaggttgaggatcggagcggcgtcctgtcgcaagcggaagcggtgctgaatgatggccagcgcctgaggttcgttatgcgtaaccagattattgttaagacggaaagcggtcaagcattgcgcgctgccgtcgattcaatggcgtctcgttatccgggcctaaccgtggactttcccatcgcgggtgggcagtactgggcagtgagcgccaaagatgtaggcacagcgatgtcggccgctgaagccctgaaccgtttactgtttgttgactgggctatggtcgatcgcagtactccgtcgcggccgggtaatcagaacccgaatgccgggatacaacagattatgctcgagcgtgcagcgatggctaaacaagcgccaggcgtggcatggccgccctcaggcggtcagcgcggcggactggacccgcaagtacctaaccagtggcatctgggaaatgcgctcaacttcggtcgcgataataacatcattccagtctttgacgacggcgttaccggcaacgggatcgtgatgtccttaagcaacgtagaacgtcggcgatttgataatgcccatcgcgatttagtggaccgtttcctgccggatctgtctgatacgccaaaccagtttgttggcccggatgcttttgacacgctatatgcaggtttgatggtggcgaccgcgggtaatggtttcgatggtcagggggtggcccctggcgcgcagattgcagctcttatccgcggcacccccctgctggaggcagcggcctacgaacaaaagaatatcccggtcaggtttcacccgatgcgcgtaacaactgcaccgttcgatgcatatggctttggcgttcctgacgaccgttacaacggtgcgaatttttatcgtttcgtccaggatgctttactgaactctcagttttttggccgtgaccgcaaaggtgtcgttcatattttcaacaatggaaccaatagctcatttccgtttccacctgatttcggtgggggcggttgggacgatattcttgcgggcaatgaagtggcagtatccgtgacaaacggatacaccgtcggccccaactattatggaagtatggtgcactactacccgcctgccaataaccgagcaaccctgattattcaaacggtggatgaagacggggtcgccgatcttttcggtacgctcgggagcggcatcttcgcgagcgtgtatggctcgactgcccagagtacgataacaacccgcctgactccgtccaccctcccgggtgatgcctttggtactctgaaccagggaattacaaccgcaggcgggaacaatgccaccggcggtgcgattgcagcgggcatagtagcgttaatgctggaggtgaatccatcattgagcatcagggatatccaacatattttgagacgtgccgcacgcgttgatccgctgaactttgatcctcaagaagagtactttcgtattgaccggatcggcccctatcagctcggcgcggctattccttcacactggcaggtcaatgcggccaacatccgccatagtgaccagcatggattcggtgtgattgatgccgaagaagcggttaaccttgctcgtacctggcggaatgttccgcgcccaatcgttcttgatacgactctggtgaatacggaaggcctgtctgtaccagatgcgaccttcatcgaaacgagcgatacaactgcctccgcgatcccgggcaccccggttccgatccctttttgtgtgagagacaacatttccattgaggcgatagaggttgaaatgactatttccggagtagggaacaacgatcttatgatttggctggtttccccgtatggaacccataccaatctgcattatccgaccagcaacaatcagatcggaaccacggacgacctgaatcccttggatgatgactcggacctcgcctttcaaggtacgaacgggtttgccttcttccagcacaacttcacgacgttcaaacattggggtgaattgagcggcggccgttggtttttaaacattcaagatcgcgggcccgatgaacagctctctgaaggcacggagccgaccgacgatgatcccggtgaagatttcgtaacaacctttggtccgctcatggtgccaaattttccgggccgctcagaaaaaacaatagagtcataccgtatcaaaatctggggcaccgcaacgaccgaagctccgtttctgggctgcaacccgactgagacgtcgtgtcctggagatgtgaatgccgatggtgtggttaacgctgaagacctggcgatttttatgacgtggtataccacaggtgatttaagggccgacgtgaatcgcgacggggtcctgaatttcgcggacattctgctgttccgtcagctatgggttcccggtttttgccaacaaaacggttttccatttgggcgtccgactagccccccatccaccggtccggatactccaaccgtaagacccatatga

SEQ ID NO: 1078 - DNA, 1290 bp, Artificial Sequence
  Synthetic Polynucleotide
atgcaccatcatcaccatcatggtggttctggtactcagatctcccacaagttgcggattggtgcactgctttgtctcataattaccggatttggggtaggcatgagtcaagcggctatcacattcaatattaccgccggccctacgacgttaaccatgccagacggtgccgttatcgatgcgtggggctttgcgctggtgagcaccgatattaacggtgctgtcactctgggccagggtatcgttaaagtgcccggagatccgttgattgtaccgccgaccgagacgacggtcacaattaacctgacgaataacctaccagaacctgtttcactgaccatccttgggcaagtgctgactccggccggcggtccggtctggacctctggcttaaattcgagcgtgagtgcgacaggggcacgcaacgctaatgactacgtttcccgtgtgagatctttcgcccatgaagcaccagcgggtggcgtagctacatatacctggaacaactttcgcgcaggcacgtatctgctgcaatcgggaaccaatccggcgaaacaggtacagatggggctttacgccgccataaaaaaggacacggcgcccggtgaggcctatccgggcgtcccctatacgcgagaactgattctggtctacagcgaaatcgatccaattatccatgcagcggtgaccaccggtaactacgggccgtcaggtacaattacttctagcttgcaccgtgatccgaaatattttttgatcaacggaatggccttcgatagtagccagcccggaggcggcctggacccagttgttttcgtggatccttttgacaaactcctagtgcgctcaattaatgcaggctatgagactcatgtcccgcagctgttaaacatgtacatgaaaacagtcgcagaagacggtaatccgtatatctatccgaaacatcaatatggcttccagctcccggcgggtaagagtatagatgcgatcttggaacccaccactgatgggcgttactccattcacgatgctgccctgcatttgacgaataacggcgcggcgtcgcctggtggaatgctggcatactatggggtgagttgcgttggggatctcgactacagcggcaccgttaattttgaagatctggctattttacgtgcgaacttttttgccgaatgcaccctagggaccccgtgtacgggtgacattaataaagatggctttgtgaatttcaccgacatgggactgctgcgcgccaacttctttcgcggcggatgcccggtaccctga

SEQ ID NO: 1079 - DNA, 1188 bp, Artificial Sequence
  Synthetic Polynucleotide
atgcaccatcatcaccatcatggtggttctggttccatgatttacctcgacaactctgcgacgtcgtttccaaaaccggaggtagtgtatcaattcatgtgtgatttttatcgtacacacggggtttcacccggacggagtggcttcgatgctgccatcgaaactgaagagatggtccatgcaaccaggaagttgcttaccgattttttcaatggtgacgatccgaaccgactgacctttagctacaatgcgagcgattcattaaacataattatccagggcctggccgaacctggtgaccatgtgattacgacctgcctggaacacaatagcgttctgcgcccgctccatcacctggagttatccggcatgatcgaagtgacttatattccatttaacggcgacggttacatcgatcccgaagatgtcaaaaacgcgatccgtaaaaatacaaagatggtggtaatgaatcattgtagcaacgttattggtaccattcagccggtgaccgaagttggaaaaatttgccgcgaggccggggtctatctagtcgtagattctacgcaatcggcaggcgcgatcccgctggatataaaagctatgaacattgacgtcctggtattcacgggccacaaatgcctcatgggtcctactggcatcggtggaagttacgtgtgtgatcatgtgccggttcgctatacccgttttggcggaaccggtgttagaagtgcacagaaaacacatctggaagaatttccgtatcgccttgagtgcggcacgcttaacctgatcggggtggcgggcttgaatgctggtgtgaagtgggtgacggaacagggtatgcaggccatgcacgcacgtgaaatggtactgtggaatcggttggtagacgggattcgtaacaatcctaaggtcactctatattgcgcgaacccgaataaaccacgaaatccggtgctgagcttcaacattaaaggactagattcgggcgacgttggtaccatgttggatgttgactacaatattgcttgtcgcactgggctccaatgcgcccctaaagtgcatgaactgatcggcaccgccgatatccacgggacagtacgcctgtctattgggccgttcaacacccaaaccgaggtggatgtggctatccaggcgattgatgaaataacatccttagcacgctga

SEQ ID NO: 1080 - DNA, 834 bp, Artificial Sequence
  Synthetic Polynucleotide
atgcaccatcatcaccatcatggtggttctggtaaaattaagatcaccggtcgtaaaatagaagtgagtgataaattgaaggagtacgcggaaaaacggatttccaaacttgaaaaatatttccagcaattaatcgacattcatctgatcctatatgtagagaaaattgatcacacggccgaactgattatcaatggagacgcagtccagtttcatgctcgcgaaaaggccgcagatttttactcagcgatcgacatgctgattgataaaatagagagccagatcgcgcgctataaagataaaattcaatctcgtaagggcatgggggttgaagattcgttctcctttgacatcagcagtgaacagggcaaagatgccctgctgaaccaggtgtcaaacaagccagtcgacaatgtggaggcgttcctccaaatgaaagttgataaaaaagattttctcttgttcaagaaaggtgtatcgctggtggattccgacgtcgactacgctaacaaaaactatgccgtaatttacaaagcaggcgacaattatcgattactggaaataccctttgacaagagtaatggtgatagcttttcttgtgaaagcttcgttgagtatgatttaaacattctgaacgattcattgacaaaccctgagatcgaatttaaacagcgtaatgactgcaacattgaacgcctgaccctagatgaagcctttgaactgatagataaaaatggtgataattatatcccgtttttcaactcggaaagcggctacttcaacgtgatttcccgtaagggcaaagattacgaagttttcgtcccggcgttctaa

SEQ ID NO: 1081 - DNA, 495 bp, Artificial Sequence
  Synthetic Polynucleotide
atgcaccatcatcaccatcatggtggttctggtggccgccttttagcgggagggatggcagccttgctcctggtggctggtggcctgttttggtggagcggtcaggcgtctagtgatccggccccacaattggcgctggctgcaccccctccgccggccgtcgagtcattaccagaaggccggtccgacgcggttggtgatgcaccgcctatgccggccgaagcgtcgccacagagccgtgaggaacgaaggttcgcgcgttacgaccgtaatcgcgatggtgtaattactcgcatcgagatgctgggctcacggaccaaagcctttaaggcactggatacaaacggcgacaaccttctgtctttcgaagaatgggccgtggctacgagtgatcgctttggggctgcggacgcagatggggatgctaaactgaccccagcagaatttgcgacgaccgctccgaaacgtaccactaagcctcgttgtcgatgctaa

SEQ ID NO: 1082 - DNA, 399 bp, Artificial Sequence
  Synthetic Polynucleotide
atgcaccatcatcaccatcatggtggttctggtttttgggagaacgggtaccatgcactggcttctctcgacgatgatcgtgatggagtgttgagtggtaaagaactagaaggcttagccatctggcaggaccttaatggcaacggtctgtgtgaacgaggcgaggttaagccggtcgcggattggggtattgtagcgatatcctgcgggtatgttaccgatatgaatcgcgccgaccgcatcgcgtatagcccccaaggtgtgttcattcgtgacggctcgaacagaccaacatacgatattatcctgcaccctgccctggcaactgtccatcgcacgaccttggcgtcagcagctacgaaacgtctgagcgaacctgcctttcggaccgcgcgctaa

SEQ ID NO: 1083 - DNA, 1488 bp, Artificial Sequence
  Synthetic Polynucleotide
atgcaccatcatcaccatcatggtggttctggtgctccagtaacgtcagcaaacgatgaatccgcgcgggccgcgtatccgcgccccttttctcgacctccgagtatgggggccgactacaatacctggcgtgatgcaaagggcccggatgttggagctactgcggtggacatatcgcgtcttcctagccgcgtcgacaactctacaaggccggagttcccaccgatttataaacagcacggtggcgcgtgtggccaatttaccgctgtggccagcatgttcacgtacgaaatgaatgttttgaacggtaccagagcagattcggatgcgagccgctttccagccgatttctcctggaacaatatcaatgcagcggacaaaaagaacggtagtgaggcttatcatgggtgggaagtcgcgaaacatattggtatccccactgtgaaaacctacggaattgtacaccgcaaaaacgccggcccatggccgaacgggtatggcatctggcgtgaagcgatggaataccgtgtggccggttatcggtataccccggcacagacggttgctcaaattcatgaggcaagaggttggttatttgatcgtaatcagccgggcgaccagtcaattggcggtctactggcgctcgatggacgcatgggcgaactggacaaagttacccgcatgatccctgaaggtgagcacatggccggtgatgatgtctggatccgttgggggcccacgggttacggccacggcataacatgcgtgggatatgatgaccgcgtgggggtggatgtaaacggcgacggcaaaattaccaatgacattgataccaatggagatgggaaggtcacactggcagattgggaacgcggtgcctttattgttgtaaactcttggggtgagaaatggagcaaagatggcaaaatctacctgttgtattccgcaatggtagacccgacatgggaacgtgggaactacctcggccgtgtcgaggttgcgcgtgccattccgcgcagcactctgaaactgaagctatcatgcgacaatagagcggctttgagggtgaacatcggtatcgcagcagatgaagatgccgcggttccagaacatgaatttgccccgcaacccctgaatggctggccgttattcggtgagggggaacatgtgggagcggtgcctctggcggggccgggcgatgacacgccgctggagctgggcatcgatcttactccgctgttcgaacagcttgacacgtcggcggatggcaacggccgcctttttcttagtttttcgcgtgctgacggctctgaaatgaaaggagaattacatgcgtgttctatccgctcttacgatgctaaaggcgcctttattggtgaaagcgccattgaatttaagaccggcaaattcggtcctgctcctctggagataaaaacctggacgattcacccaaataatggcatgccgacaagcccggaacccaattga

SEQ ID NO: 1084 - DNA, 1263 bp, Artificial Sequence
  Synthetic Polynucleotide
atgcaccatcatcaccatcatggtggttctggtagtcatgctcgcaccgcatctctcttagcccttatgtttacagtaagcgggtcacacgcgcaggttggccgggtggtccattacgacatttcccacgatttccgtctgatcgcgccccaagccgatacggcgagggtgatgtttggagacttccgtcatgcatggatacgcactaatggtctggagacggaacagcacgatccaccggctcaacagccggcatttgatccgtatggcaccgaacatttcggtttgcatggcatggcgtttaacagcggtctgtttgggggttcggtcccagttcagtatctgaccggcgtgattcctccgaccgggagtcctggcgccgccgtgtgtttagaccgcgtcctgctggcgtcacgtgctcgagcatgcaacgttctacgcgtagatccctgggtgaatcaagccccgatcgatatttctggccgtatccagtcgtacggttatgctgacgcggcggttcaaggctccggtgccgcgttcgtgtacgcatttagcactgcgtgggtacgaattgattctggtgttaccctcgcaagcggacagatccagtggcagattggagctttggtagacagtgtcggcggaggtgccggctcgtccgccattaaagatccggtgatcctgacggcagtaaacactagcacaggggaggtggtggaacacacccttgttgacgtggatatgcgccacgacggaccgggccgtgtcgaatttgcgcctggcacgttaactgtggatataccgaccttcgaactgatcctgagtgtccatcctggtattataggcccagggcaagatggtacactaattatcgaagtcgaccagggcgttgtccagaacgcactgggttcaggtttatatgcggggagtgccccggccccggggaccaccgtgcccttcactgtaccgatgccggggattgtgctggattacgacctgaatctcgatccaacacaaccttgggaggtttctgcggagatgggcggaggcggcggggcggatgcgagcgctggtgcgccaccgtgtgctgccgatatcaatggtgatggagttttgaattttttcgatgtggccgaatttatggcgctttttctggaacaacatccggcagctgatttcaacggcgatggagcttttgacttctttgatattgcgttattcttaggggcctttcaggccggctgcgctgatcaacccggctaa

SEQ ID NO: 1085 - DNA, 2046 bp, Artificial Sequence
  Synthetic Polynucleotide
atgcaccatcatcaccatcatggtggttctggtgcaatggccagccccatcgcgattaggcttacgatgtctagtcgtttgctgcaagtggctaccggagaagatggcgagtcgcattcagaaatgtcctccagcgactttttcgatgaagaggcgcggatactcgggacacagtctccaatcggtgaacagctaagcgaggcagcccgcagatggtcggcgctgctggtatggttactgaccctgggcccgttaagtttgtcggtcctgcgtgttccgctccctgacgtgatgggtctgggactcgccgtctgggcgtggtatggcttactggttgtgctgatgcaagctattattcgcgttggtatctacggcgtcgtacgttggctgcgcaaggcagaagcgcgccgtcttgaatttggtgatagcgccgggactattgatctcgcgtctcacctagaggccatcgtggtcccgctgacgtcattctttaccacaaccggctttgcacttgcgtggtatagtgtgtacccgactgggtgccccacggaaccatcaccgattcctgctccggaagtgcagggtaatgaggcaagcggccgaatcttcattctgttggcgtcaatgatgcagggaatttgtgtttatgattttgttacagacgcagtgatcagtaccctcctggcgtccgccgtcttagctatagaaatcggcctgatgcgcgccggtttatggggtttcttgcggtcgaactttcttgaacgtatccttgaaaaccgttacagaacctatgtagtagagcaagttcggcagcaaaccctgccacccgcggaaagcaatcgccgaattagcgaaccgattgctttcccgtttgcgctgccattccatgtgccttatgttgatcgtttgcgcgcatggctgaacgcaggaatactggacgaagataatcgctcgtttgacgcccagattagtggcaggccgctggcctactcagagtacaggcgccgtttaggcgcttggattgcgcgtcacgggcttgatgaggctgtagatcaggtggctcgtagcatcccgcaaacggacggtgaagcgaaagccgcagcgaaagagatctttgcgcgccttcgccgtcaggatcgcgattatctactgcccgatgacatggccgtactgtttcagggccgagcggccactcgcgatgcctacggaattttcgaccgtgaccaggacggtagcgtctctaaaaccgagtttcgtcatacgtgcgtgatggtttatcgcgaaatgcggaacctggccctaagtgtacaggatgccggacgtgcatttcgccagttagccgattcattgcacctcctggtgcttacggcactgttcttcatcacgcttgcgatcttcggcgtgcgagtttatgcgctgtccgctctggtcttcagtctgttattgggcctgaacgttctggtcggtgatgttgcaaaacgtgcgtttcaagggattatttttctcttcatagaccatccgtacgatgtgggcgatcgagtactggtgcagaatttatcggataatgacccgttgaacgtgcagcgcatctcaatgctgactaccgtcttcactcgctggaatggtcaacaagtttatgtcccgaacagtcttctggcaaacgccaccatttacaatgtgagccgtacagctgaacagtgggatcggattaggttaaccatcaagaacccgcacgaccagtcgtctcccaaagcgccaggccgctctgatccaattgcagacctgcgtgatgcggtggaagcgtttcttaaacgccaaccagcggatttcatggcagcttacgagttgaagcctattatagccggagaactgggtaaatcggaaactgatttggaaattatccaactggttctgggggtgcagtgtcgtccgaccgttgactcccagaaacggtggacccgccatgctagactcatggcttttgtgaagcaggcagtcgcgggtgccggactgactttggtcggcgctcccaaaagcgatagttga

SEQ ID NO: 1086 - DNA, 450 bp, Artificial Sequence
  Synthetic Polynucleotide
atgcaccatcatcaccatcatggtggttctggtaagaatatactgacggtccttgcgctcgcagtgacaggggccatgccaatcgctgcgactgccgcggatccggcacaacccgctacccctgcggagcgtgccacgccggccgaaccgggagcaaaaaccccatcggctatgccggcggaacctgcaaccccggccgagcgagcgacaccggccggcgcagcgaaaggtcccttacagggcgttcccccggaagcgggtcggaccgaactgcctccgatgtttcgtgagttggaccaggataaagacggccaaatttccaaaggtgaagcgaagcgcagcgccgaaactcaggcctctttcgattcaatggacacggatcgcaacggaaaaattagtctgatcgaatggggcgctgctgataaagccaaacagaggagcaagcaatga

SEQ ID NO: 1087 - DNA, 1434 bp, Artificial Sequence
  Synthetic Polynucleotide
atgcaccatcatcaccatcatggtggttctggtcgtgcaggccagtcgcaaactgaagggcgcacgcccgtgatacactcaaaacatatggtacgaaatggagcgcttggcgccatggctttactggccgcgagcggtggtgttatggcgcaggattccggcttgtctatggtcctggaccggagtagcattgtgtcgggtgaggtagtccatgttgaagtggtggggcgctttccgtccagcgtttatgcactcgcgcaagtgggcatggatgtattcgcaagcatcgatgcttggaccgccgcgtctagtggcgttctggccggggacgctgtctggggtgcagcatttgatcaggtccacgcgcctttcgcgggcctgtttgctgatccaaccaacccgctgccgatttggtcgggtacatacgctcctaacgtgacgggaccggccttcctacgtttacgtgcagacgcggattttttcgcctattacccatcagagctgacctcctctaccgccgttgttgcggacgcgctgccgggacgccagtatctgtgggtggacgccgtcgcagtagaaggcgtgggtgaagtggcaccgggcgagggcacgggtatggaagtgcggcccgatggtttggtcgtggccactccgcaagatgaagcaatcctgattgggctacttctcccagctgtgcagaaggtccgcgaagcggccgttcgtatggatgtggtcgcgcaacccgaagtagttagaaccacattgcttctgagcaccgacacagcaacggccgatgtagtgcctattgatcagttaagtttaaattttggaaaaatcgaggacccttccacgggggaagtaatgtacgaattgacctctgagggcagcttttctcacctgattctgatctgcatcattggcccggatggtcagcagatctgttatccaggggatcgcttggtggcgggcggtactcaatcggcaccgctcattcgattcgaccgtatgccgacctgcctcaccttctcaatcgagcaggatgatgttaccggtgaagatgtgctgggactttcaccctgtgatgacggcccgtttttcatcgaaattccgggagaatttaaaggcctgactacaggccctatcgaagttagggttatgccgatttacattgaatatgatggcatagatggttccgtgacggaaatgcatgggttaccgcgcggcccggagggtcgtgttgggattgagtttagccatactgcttcgtgcgacgctgatttcgacggtgacggggctttaactctgttcgattttctggcgttccagaacgcgtttggtatgggtctgcgtagtgcggatttcgatggcgacggtgcgctgacgctttttgactttcttgcgtaccaaaatgctttcgccctgggttgtgcctga

SEQ ID NO: 1088 - DNA, 1344 bp, Artificial Sequence
  Synthetic Polynucleotide
atgcaccatcatcaccatcatggtggttctggtaaggggactcctatgaaatacaccacaagtcagagactttttgatcgcgcgaaagaattgattccaggtggcgtgaactccccggtccgagcttgtcgtagcgttggtgccaatcccctcttcatccgccgtgcagagggctcacgcatatttgacgtagatggcaacggatatattgactatgtgggttcgtggggcccgatgatcctgggtcatcgtcacccggcggttattgaagccttaaccgctgcactggcgaatggcacgagctacggggcacccaccgaactggaggtggaaatggcccaactgatcattgatgcggtcccgtctgtggagatggtaaggatggttaactctggtacggaagcgaccatgtcagcaattcggttggcccgtgcggctacgggacgcgatctgatcgtcaaattcgatggttgctatcatggccacgcggacagccttctcgtggaagccgggagcggcgtcgctactctggcgattgccggttccccaggagtaccggaaagttttgtttcgcatacagtgtcgattgcatacaatgattccgaggcggtgcgtcaggttatggcggctaaaggcgacaaaatcgcggcagtcatcgtggaggccgtggccggtaacatggggttagtacctccggttgaaggcttcctgaataccctgcggcaggaatgcgatagatcaggcagcgtactgatttttgacgaggtcatgacgggctttcgcgtcgcttatgggggagcccaacgcctgtacggaataaagccagatttaacatgtttcggtaaaatcattgggggtggtttgccggtgggcgcatatgggggccgccgagatctgatgactcagatggcaccgcaaggaccggtttatcaggccggccgtctcagtggcaacccacttgcgatggcggccggtattgcgggaatgcgtgaactgggcaaacctggcttttacgaagcgctgggcgcaaaggcgtctcgtctagtacacggtttaggcgctgccgcaaaaaagtacgacatcgctgtttctattgccaatgtgggtagcatgctcggacttttctttgtcgatacccctgtgcgcaacttcgaggatgctaaacgatcgaacctcgatcgattttcggcatattaccggatcatgctggaaaacggtatctatctagcgccgtcccagttcgaagcgctatttgtgtcagcggcacatgaagaatctgacatagaagcaacgcttcgtgccgccgaagccgcttttaaaaggctgagcgacaaacaacagtag

SEQ ID NO: 1089 - DNA, 942 bp, Artificial Sequence
  Synthetic Polynucleotide
atgcaccatcatcaccatcatggtggttctggtatgcaacgccgttcaactgcgttgaccctcttccttgctatcacatcctgttacttagcagccgatgagaaagcgcctaagaaaccggtacaccagcccaccgcccagggtaaagcaagttttatacaagactatgatctggacaaagatggcaccgtttctgaagcggaatttgcggaagtccggcagcagaggtattcggccatggacgagaataaggatggacaagtgagcgtggatgaatacgttaacgagtatgcaggtcgcctggacaaaaaactggatacggaacgtacagggcagattaaacagacgctggtccgaattgaagctctggataaaaacaaaagcaagactatcggccatgacgaatataatgcgtcgggtgataaggccttcgcttacattgacaccaacaaagatggcgtgatctctaaagccgatccgttgccagaacgtgagcgcaaaccggatgcaaagcagacggtacgtgcccgcccagcgctagttatgccgaccacgcatagcgtggtcggtatgctcgacatgtacgatcaaaatggcgacgggaaagtggataaaaccgagtatcagcaacaacgggatgctgcctttgcgcgcacggaccttgataaaaacggcgaattatccagcgatgaatacctgaacgagttcgtggaccgtctggatcggcagattgccaaaacacgtaccgcgcagcttaagcaagctgcggtacgctttaaagcactggataccgacaacagtcagcaaatttcatcagccgaatttaatgcatctggagaacgcatgttcaagcgttgggataccgacctgaatcagcaggttactatggccgaggcactacctgttattgaagcggaagccaacaaaggtacggcggaatga

SEQ ID NO: 1090 - DNA, 2184 bp, Artificial Sequence
  Synthetic Polynucleotide
atgcaccatcatcaccatcatggtggttctggtgtcgaatgtatggtgattcagggctttttgacgtctggacgctggagtacactcgggggtagcatattattcttttgcattggccttatgtccctgtcggcacaatcagtaaatgcgagcgacccttccgatctgtcgaaggccctgatcggtcccggttggagccagccggctctgggcggtgagctatgcaactgggatccaagtgcgaaagcgcacgttatctgtgtgctgggctgcgaatgcccggttgcccgtttctacgcagccaaattgcaatcaattgctgagcagtatgaacctcggggcgtccgttttgttggggtgatgggtttactgcaagacaacgaatctaaaatccgcagcttcgtaaaagataccgaaatttcttttccgatggtgagagatgagaatcagcgactactgactcagttgcgtgcgacccgcacccccgaagtgtttgtgattgacgaacgcggcagcgtcgtctatcgtgggagggttgatgatcaaatggctccgggcgtgaaaaagaaccaggccacgacgcaggagctggttgataccctagacgcggtactgaaagggctcccgatcccaaatccaactacgacagcagcaggttgtttaataaccttcgcaaaaaacgactcaggaccgtcgaccaaacaagacgcggcccgtaccgatgctgaacagcaggtcgttagtgaagcgactgctgaaatggatacgggaattatcgcgccgacgtacgccggcaacattgctgcaatctttaacaaacattgttatgattgccatcgtccaggggatatcggtccgttcgacatttccaatgtggatgagattcagggctggggagaaatgatcgtggaagtgattgagaatggtcgcatgcccccttggcacgcgagttctgaacacggcgagttccggaatgcccgcgtaatgagcgccgaagagaaggacctggttaaaacctgggtcagcgctggctccccgcttgggaaccttgacacgctgccggaactgcctaaggtaaaaactggttggcaacttccgaaagagccggatctgatagttccgatgcgggaaaccccttttactgtgcccccggtgggtacagtcgaatatcagtactttgtcgtagacccgaaattgaccgaagatcgatggatcacagcggctcaggttattcccggcaatgcctcgattgtccatcatgcgatcgttttcattcgcccaccggatggagagcaaatcaagggagtatcctggctgacctcattcgtaccgggccagcgcgcagcggagtaccctgcgggctatgcgcgtaaagtaccagcgggttccaaatttgtgttccaaatgcattacacgccgataggcaaggtgcagcaagatattaccaaagtgggcttggtttttgttgatccgagcgaagtgacccacgaagttagtaccattgccggcatcgaccaatcttttgaaatcccaccgtatgccgaagctcatacggtccgttctaaaataagcctgccaaggggtaactctaaaatgttagtggccgcgccccacatgcatctgcgtgggaaaagttttcgcttaacttcggttacaaagcgcggtaccgaagaagtactcctggacgtgccacgttacgatttcaattggcagcatgcatatgagttcgccacgcctattgatgtccgcgagctgcaatcactggaatttgagacttcttatgataactcggaaggtaaccccttcaacccaaaccctgccgaatacgtaatgtggggtgatcagacatgggaggaaatggctgtggtttttctcgatgttgctaccgaaatccggagccgcggcgactccgcactagatactactcagacgattccggcagcaatctttcgtggcggactagcggcagaccagaccgaaaagaaagagccgtcggaaaaagccgtgaagttcgccgaagactttatcaaacggtttgatcgtaatggggacggagtagtttctaaagcggaggtcagcgacattgtacgcagatattcattctcgcagatcgataaaaatggcgaccagttacttacccgtgacgaactgattgaagcagcagaaggccaacgcgcgcgctga

SEQ ID NO: 1091 - DNA, 1452 bp, Artificial Sequence
  Synthetic Polynucleotide
atgcaccatcatcaccatcatggtggttctggtaaaacgatactgcatccgatcgctattgcagccttcgcgttttgtacatcgctcgcgttagcccagccagaatgcgaggctactcgtattgttagccctccggaaaccccgcccagtcggtttggcgaccgcgtggcaaccaatgggaggcaatggatcatcacggatgccaacgcgcgaaccctttgcccgggagatccgttccactgttccgcgggtgcggtccattcatatgagatgattgacggccagctggtacaccgtcaaacgctgacaccaccgcgccctcgtctaggtgatttttacggcattagcttggatatccatgaaaaccgcttaattgtgggtaccctgaattatacgtggccagacaacccgcgccgtgggggcgcttttgtttacgagtataccggcgaagaatgggtcgaagtgggtcagatccagaagccggatattgatcccgcattcctgaaagacatgggagtcactgccaaaatgcacgatgggctcgcgctactgcccgctggtactctgcggcgcggagtgcttacctatcgtgagacggccgaaggctgggcgtttcatgaactgatcgaatctccggacggcctgccagcagatgccttgttcggtacattcctagcgatgggcggcccttgggtttttatcagcgcgtttcgcgactcatccgtaatgccgaatgccggttctgtttacgtgtacagacgtgaagcagatggtacgctcgccttcgttgagaaactggtgtcgccggacgctcctgcccaggcgtataccggctttgggtttgggatcgcctttgatggccaaaccttggcggtgggggcaccgggtgtcgaccgcgatgcggaatcgcagggtgtagtgtatactttcgaatttgatggacgtagttgggtgcagcgacaagagttagtacgcccggatcctcaagaactggaacagttcggccagtggttaagcatgggtggtggcgttctgatggctatgtccacccgggatattccacgcatttcccacaacagtccgtacgcttatcggcgcggcgcggacggtgtatggcgtgaagccgggctgttagtccccaacccaaccttctttgcgatagattacggagcacgtacggctaccgacgggcgtcatgttctggtgggcagcagccaggatgtggagccggatggaattactacattcggtgccgcatacttattcgacttgacctgctttgattgtcaaccagatctggaccatgatggtgtacttaccatctttgattatctcacgttccaaaccgcgttcggcacggcggacccattggcagactttgatggcgacggtgaactgactcttttcgactttcaggcttttcagacagcttttgggcagggctgcccctga

SEQ ID NO: 1092 - DNA, 903 bp, Artificial Sequence
  Synthetic Polynucleotide
atgcaccatcatcaccatcatggtggttctggtacgatgaaaaagaggatcgcacttttaactctcaccgcggctctggccacccctatttgcttggcgtgtgacgtcagcgcccaagatgatggagatcgcagaaacccccgtcgtggtgaaggggctcgcggcgacggtgcgcggggccagggtggccagggtgggcaaaggggaggcggcgagggtcgtgaaggtcagggcagagggggcttgggcagaaatgccgcaggtcagggaggcccgggtcaaggtgggccaggccaggggcagcgcggtccgggcttaggcggttttggtcttggaccgggcggcccaggcggtccgggtggacctggaggcttcgatggcagtatgatgtttggccagctgatgaaagcactgccgctgatgaaagcgctggacgcggatggtgatggtgagctatccgcaatggaaatagaaaacgcttctaaagtgctgctgacacttgacaccaatggggatgggaagttgtcggtagacgaactgcgcccgaacccggccgatatgcgtcccgggctgctcggaggacccggtcgaggcggcgagggtggcgaaggccgtggcatgggcgccgaagttctggcccgcatgttcgagcaacgcgatacgaataacgatgggttcttgagcggtgatgaaattccggaacgcatgcagggcatcatggcgcgtattgacaaagatggtgacggtaaaatctcaaaggaagagttacaacagattcaaccaggcatgatggaacgattgcgcgaaggctttggggctggtgcgggcggccgtcggggtgggggaggtggtggaggcggagagggagacggaccgatccgcccacgtcgccctaatcagtag

SEQ ID NO: 1093 - DNA, 1032 bp, Artificial Sequence
  Synthetic Polynucleotide
atgcaccatcatcaccatcatggtggttctggtgtgatgcaacgatggatccgctccgcgctcgtccttttagtagcattggctctggccgcgcaggcccagccagaagggaagcgtccccggccggagggtggaaaattcgacatgccggaacctgatctgaacggcgatggtgttgtggacgatgaagaggcggctcagtatggcaaagcacgcctggaacaagttaaaaaatcattggatactatggtaaaacgttttgacgccaatggcgatggtaacctggatgatgaagaacaggcgcgtatgaagaatcagctagcagagcatggcggtgggcgcgacccgctggcgatgttaaaaagatttgacaaagatggcgatttccgcctcagcgcagacgagcaagccgaagcccaaaaggcttttgcggcccaggcaaagcagcccagaggtggccgtgaagggcaaccgggacgagagggtcagcgcgggcctcagttcgcggatccagatgccaacggcgacggaattgtggatgaacaggaggcgagggctgaagccgaacggcgtgtcgaaatggcccgccgtcaattggaaatgtttaaagaacgtcaagctcagaatccggacgttcagatgccggcgtttatggcagcagtggatacaaaccgcgatggtgagctgaacggcgaagaggcgaatgctatagtggctcgcgttatggcggaatttgaagaacgtaacgcgaccgtcctgaacattttcgacggtaacggcgatggtgttttcgatgaggctgaaatggcggccctgaaaaaagcggtacgctaccaccaggaaatgcagaggcagaccatgcagcgcatggggatgggaccgggcggtcctgagcgtcgcggtccacagaatgaggccaaacctgaacgtcgcggcccgcaaaatgaagctaagccagaacgtcgtggcccgcaaaatgaagccaaaccggaacggcctgcgggaaaagaccgagaaagacgccaaaaatag

SEQ ID NO: 1094 - DNA, 1698 bp, Artificial Sequence
  Synthetic Polynucleotide
atgcaccatcatcaccatcatggtggttctggtaaacctgcgatactggcccttgcagtattgctcgcggctcccgccgccgtgcgcgcagcggaccgaccgaacgtcctgctaatttgcgttgatgatttaaagccgctgctagggtgttacgacgcaccactggtgcaaagccctaatatcgatcggctggcggctagaggcgttctttttgaacgcgcctattgcaaccaggcggtgtgtgcaccgtcacgtaattccttgatgacgggactgaggccgcagacaattggtatctatgatctgccgaccaacttccgtcagggtgctccagacgccgtcactgtcgcgcaatactttcgtcagcacggctatcgcaccgaggcattaggcaaaattatgcatgttggtcatgggaatttcgaagatcaggcgtcttggagtgtgccgcattggcgcccaaaaggcggcggttaccagctcccggctagcacggcgaccactcgtccggcccgtgtaggtggaccccgcggggctgcaaccgaatgcgcggacgtcacggatgctgcctatgcggatggcatgatcgccgatgaggccattgcccggttacgcgctgcgcaagcccaaccagccgaaccttttttcctggcggtgggatttctgaaaccccacttgccgttcgtagctccgaagaaatactgggacctgtatgaacgatcttcgtttgaaccgcgccgtcagcaaacacctccggagggtgcaccaaccttcgccccgacgacctggggcgaattgcgtcagtattcagatatcccagaaacgggtcccttgagcgcggaccagcaaaggcagctgattcacggctatcatgctgcggtgtcgtacatggatgcacaactggggcgcgtactcgatgcgctggatcagaccggatttgcgcgtaacacaatcattgttctgtggggcgatcatggttggcaccttggggaccacggcatgtggtgtaaacataccaattacgagcaggcggcccgtatccctcttatcgtcgccgtcccgggaactgcgcgcgcaggcgtgcgaaccggtgcattagcagaaacagttgacatttatcctaccctgtgcgaactggccggtctaccggctcccagagatttagatggctccagctttgcgccgattctgaaagacccggcggctgccaccaaggacgcaatattacatgtttatccacggtcacaactgcttggtcgtgcggtgcgcacggagagatatcgtctggtagaatggaaacgcatcggcgaggccgcagacactgctgaattggaactctacgattacgaaactgaccccgatgagacacgcaacctggcgggagatcatccggagacggtggctcagctccgggcaatcctggctacccagccggaagctaagcctcaggtgcgtgcagcctcgccagcaggtcaagaagcggggactgccgccagcaaacctaaacaggacagagcggctatgtttgcacgccgcgacaaagatggtgatggcacccttactcgtgatgaatttctgacgggccagccggatccggatgaagcgccgaaacgcttcgttgtgttcgatgccgataaaaatggggtcctgagtcgtgatgagtttattacgggtggaaagaaccaaaccgttaagtga

SEQ ID NO: 1095 - DNA, 780 bp, Artificial Sequence
  Synthetic Polynucleotide
atgcaccatcatcaccatcatggtggttctggtcgcccttccgcaacgaagggtttcgctatgtctagtttggatagcctctcgtcactgtttagcccaagcgggatgttaatgtcttcccttacatcgcacctccaaagtaaagcgatgaaaaagatggacatggataccgattgctcagtgtcacagagcgaatttcaggccgcgatgcaaaaagcagccggcaaactgggagtagagttgtccggtgacgatgcctcgcagatgttcaccggctttgatacggacgcgtctggcgctctggacacagccgaagttggtggggtcgtgactggtctgctgagcaccttaggcaatgcacagtcttacatgcagtccaacggtatgggccaatcggcggatgattttgcgacgagggatctggacggcgatgggatgctgagcctaagtgaatttaccggcgaggctgcccagagcggagtcgctcgtgttactgtgaccacgcaaaccatcgaagtacccttggatgcgtcggcaccgcagcagtcacaagccgtcaccgcggcagatgcgggtactggtaccgttacagggggcaccgccacgaacgcagcctctagcgtggacactctgatggctagtttagacacaaatcaggacggccagattagcggcgatgaactgaccgcgttcgtgtcccagattgagacggttgtacaacgatataacgacacggcgctggcatcttcgggttccagcccgtcatcaacgcaagcctga

SEQ ID NO: 1096 - DNA, 1722 bp, Artificial Sequence
  Synthetic Polynucleotide
atgcaccatcatcaccatcatggtggttctggtctcgcatatcaggccaaatacatgacactggcggctcccccatgttcaccggcgcgcattcgaccgctttgcttaaagaaacgtcaaaccatgaaacctactatagccagtatcgcagtcaccctattgctggcgccgcgggccacgctgctggcggctgaaacgcctgagtccgcagcccagccgaatatcattttaattctggcggacgatctgggggctcgtgaattggcgtgctatggtaacaccgaacaccgcaccccaaacctcgatcgtatggcagcagagggaatgcgctttgaaacattctacgtaaatccgctttgtactccgacgcgtgttgctctgatgactggccaatatggttttcataacggcttcctgggcatgcaggacccagcctttaagcctgatccgaaatcgccccaggcgcagatcggtaatcatttcacccacgctgacttactgaaaagccgcgggtacgccaccgcgctggtgggcaaatggcaattgtctggtgtgcttccgaccctaattcatgatgccggctttgatgagtatcgcatgtgggcttacgatcacaacctgccgcccgggatcacgcatcctgcccatgaaaggggcggtcaggcctgccgttattggcacccgagcattgtcgaaaacggtaaatacttgccgacgaaacccgacgattatggaccggatctgtttaatgacttcgtgatcgattttgcgcggcgccataagacagagccattctttgtttattacacctcggttctcacgcactctccccacctggaaacccctgacccgggacagccaggccaacgttggccggccacctttaaatccagcttagaatatctggatcatttaatgggcaaactcctggcgggcttaaaagcagagggcctggatgataacactttggtaattttcctaggtgataatgggacagggggtgacggcaagggaatggtgacagaactgggtgctcgtgttccatgtatagtgcgcgggccgggtgtcaagccaggtgtagtaagtcgcgcggtggctgaccttaccgacattttgccgacgcttgcagaaagcgcgggggccgaactgtctaaagatcgtccattcgatggatcgtcgctgggcccggttctgcgcggcgaagaggaaaaacatagagattgggcatatagtcacctagatgatggccgggtgctgcgcgacagccgttggttgcttgaaattgcaaaaggtgctaaaggggagaaattctttgattgcggtgaatcaagagacggtaccggctatacggacgtcactaattccacagatcccgcggtacaggcagcgcgcgctcgtttcgcagaaatcctggcgaagctcccggaacccaaaccgcgcgatgggctgatgccacgtagtcaaaccactactgagcgcaaacaaaagaaggaggccggcgcggctggccagcgcgttccgcctaccacgccggaccgagtcgcacgttttggccagcgcgatcaaaaccatgacggagtgctctcgcacgaggaatttatgagcaccctggcatcctcagatcgagaggccggagaaacccggttcaaaaaactggatactgaccgtgatggacagctaactcaggatgagtttttgggtacgaccgggaaaaccgaatga

SEQ ID NO: 1097 - DNA, 1740 bp, Artificial Sequence
  Synthetic Polynucleotide
atgcaccatcatcaccatcatggtggttctggttccgccatgcgagtctcgctctctcttatctgtgctgtggcgttgagtatgacaattgcaacgcctgccggattcgcggctccagcaactaccttatatctgcaaaaccccgacgggggtgcggtacgcgcgctgctaataggcattgatgcctaccagtatgttcgtccgctgaagggcagcgtggccgatgctcgtgatatcgaaggttcactgcggagtatgggcaccacggacattgttaccttgctggatgcacaggccaatcgcgcgaacatcctgaaaaatatcagcgacttagctcaacgcactaaagcaaacgatctcattattctagcgattgcgggtcacggcgcccaggagccggaatcgatcaaaggatctgaaccggatggtatgcaggacgtctttttgctgccgggctttgctcctaatgcggatgggagcggtcaacggattctgggatctgagttcaaccattttattcgtcagttcgaactgaggggcgccaaaatcctgtttgtagcggacacatgccatggtggcggtatggcacgcgaaatcgatccgcgtgcagcagagatgtcctttcgccaggtgccaacctacaagctttcggtggacaaactcagtcctgttactgataaagcggatccggtcaccgatctcgacctggaccacacagctttccttgcagccgtcgaccgcaacacgaaagcgccggaagttaaaataccgtcaattgagggcctgcgtggggcgttatcctatgccgtggcgcgtgcgtttgaaggtggtgccgatgctgatcatgatgggaaggtgacgttaaaggaactatttgcaaatgtcagacaagtagtttaccagctctcagatcaacgtcagaacattgtgaccaaaacgagccccggccgctcggttgataatgacgtagtcttccagctgacccgcggtctgaccctgccagtaccctccgaaccgcagcctgcgcaacaacgtgccatcccgacggtggtccccgacactgcggctaccgttgcgaacgcaagcgccagcgagccggcagcggctaggagtgcatttccaatcagattagccgcactggatggcggcacggggtatttcccgaaattggcctctcgcgaggccactatagaaattgtgaaacctgtggataatccagacctgatctgggatccgaagagtcgtgacgtgattagctggggagatgttatcgcctacaaagtggacgtcaatgatctcgcgatggttgtggatcgaaccgcggcggtgcgtgaacttaaaaagattgctacaaaagcgccacaggtcgttcgtgtagccccggatgacgcacagcatcgcaacaaccagccagtccagatcgaactctccgatgttgccggtcgctctgtcatactgtttgatatttcgggcgatgggaccgtacaaatgctatatccgattgggtccgatgctgcgcccacacagacgggcaatctgcgcctgccgcttagagttcgggagccttttggagcagaacaagtagtggcgatcaccagcagccagcgtctgaacgacttagaacaggctctgctgcaattaaatcgccgcaaagccccgggccagctcattcgtatcatggcgaaatacttgcccccggatgcacgggtgggtagtatcggcttcttcacgaccccatag

SEQ ID NO: 1098 - DNA, 600 bp, Artificial Sequence
  Synthetic Polynucleotide
atgcaccatcatcaccatcatggtggttctggttcctttattcgcgccaacaatcaagtgatctcgttcgctgaatatacggacgttcttcagcgtgatcagagattttttactgcaaacgagctgaccataccagcggatagtggcttccaaaatatccccgaatttgtagaagacttgctggcgcagtcaacaaccaggattctactcaaattcaagtctacgacatggtggcagggttacaacaattatgtcaacaatcctatttaccgtttaaacaatctgccggatctggacccgaaccggatcgatccggggaaccagcgaggacgtcaaggtgcctttaccgatctttgcgtgtattatgcgatgaaagagtacctgctgccactggtcagccagttcgatacggacggcgcagatctcgcaaaaattcagtactatgataccaaatttatggatttatttagcgaattggttgccatggcggactggtatgacgctgataactccggtaccgtggatcccgacgaaatagcatactcttatcagcaaactcgccgcactcggcgtcgtcaacaaattgtacgcgttcgatga

SEQ ID NO: 1099 - DNA, 615 bp, Artificial Sequence
  Synthetic Polynucleotide
atgcaccatcatcaccatcatggtggttctggtcgatccgcggatgccgggcgctcatcgccacccaatggcgaacctaccatgacacgtatggagctggcactcgctgcggtgcttgccgtcgcagcggccggtggaagtgcagcggctctggccagcggcaaaccgggtatgcagagagcagaccatggcgcgtttgcccaagaacgtgttgcggaaatggatgccgataaggacggtaaattatctgctgccgagatgcgcgctttccacgcggcccggtttgcgaaagtagacgcaaacggcgatggaaaattgagcctggaagaactggatgccggtcgcaaggcagagcgtcagcaacgtctcaaaaagatggtgctgtggcttgatgcggatggggacggcatgttatcagcggaagaatttgagccgcgcaaaggagccatgctcgcgaggatggatgctgacggtgatggcgcactgagcatggaagaaatgcgcgatggcgcccgccgtttccatcaccgcaaagacggtcagcatggtgggcgtcacggtcatcacggcagtccggcagaggcaccggcgggtgacgccgctccaaaaaactaa

SEQ ID NO: 1100 - DNA, 1944 bp, Artificial Sequence
  Synthetic Polynucleotide
atgcaccatcatcaccatcatggtggttctggtccacggctcgcccgcttgttacttctgctgctggcatgctgtctgcctgcttggcttccggcgcaaccggatgcgccgcgagccctggggcgtgtaacgttagagcccgcgaccctcccgcaggtcactgtgccagttgacctgtactcggcaagtcatgctttggtggttggcgcatcacgctatcactccggttggcctgccctccccggcgtaagagatgacgtcgcggcagtgtctacagcgctggaagcccatggattcaccgtggaagttgtgatggatccgggtgcgcaggctctgagggatgcgtttaaccaatttattgcgcggcacggtttcgacagccgcgctcgcctgctgttttatttcgcgggccatggacacacccgtcagacggcctacggcggtgagatggggtatttggttccggtcgatgcaccagatcctcaggctgacatcaatgtatttttaagccgcgccctggacatggaaaccgtacaagtgtacgcccgtcgtatagaatctcgtcatgctctatttgttttcgatagctgcttttcaggctcgatttttgccctgagtcgtgatgtgccgccggccatctccaacaaaacagcaaatccggtccgccagttcattacttcgggaggcgcggatcagacggtgcctgatgaatccctatttcgccaacagttcgtcgaggcgcttgcgggggaagcagaccggaacagagatggttatgtgaccgggaccgaactcggtgacttcctgcacgagcgcgtagtcaattatacgcggaacgcacagacgccgcaatacggcaagatccgtgatcccaaattagataaaggcgactttgttttccagttggcgaaagccgcgcctgcgccgccaccgttcgttccgagcgttgtctcagtgcccagcgtggccccagcagccacccccgacccgtttgcggaatttgaagcccgtgagaaactgcttgcccaagctagagaacgttatgattttgtacagggcattgatgccgcaacctcaggttatactgccgctgataaggcacgtctgtggaaagcatacttagactcttacgagccgagcgggcatgaagttgctaaggcgcgcgagcgtttgaaatattggcaagactggccgcccgcgccaatgcctacccctacgccggctggaccgaaacccggccaggacttctcgctggatctaggtggtggcgtctctatgccgctagtatggatcgaaccagggacctttacaatgggaagcccgagtggcgaatcggggcgcgattccgatgaaggtccccaaacacgcgtgactataagtaaaggattttggatgggcgagacggaagttacccaggcccagtggcgtgccgtaatgggttctaatccgagcaacttcaagggcgacacgctgccggtggagaatgtgagttggaacgacgccgtggaattttgtcgaaaagtcagttctagtactggccgtacagtcaccctcccaacagaagcgcaatgggaatatgcctgccgcgctggtaccactacccgattcagctttggcgattcggactcaggtctgggcaatcatgcgtggtacggtagcaactccggtggacagaccaaaccggttcgcgggaaacagccgaatgcgtggggtctgtacgatatgcacggcaacgtgtccgagtggtgtagcgattggtatggcaactatccaggtggtagcgcaacggaccccagaggccctaattctgggtcattcagggtcttacgtggaggcagctggggtctgtccgcacgctactgccggtctgcatgtcgcctctcgggcgatccgccctgccggaacgactattttggctttcgcccagtgctgtcggttcagtaa

SEQ ID NO: 1101 - DNA, 342 bp, Artificial Sequence
  Synthetic Polynucleotide
atgcaccatcatcaccatcatggtggttctggtatgaaacatcatcaccaccaccacggtccgggtggcgactacaacgcggatggctggatcgagttcgaggaactgatgcagatttttgtgaagaccctgaccggtaaaaccatcaccctggaagtggaaccgagcgacaccattgagaacgttaaggcgaaaatccaagacaaggaaggcattccgccggatcagcaacgtctgatcttcgcgggtaaacagctggaggacggccgtaccctgagcgattataacattcaaaaggaaagcaccctgcacctggttctgcgtctgcgtggtggctgataa

SEQ ID NO: 1102 - DNA, 1236 bp, Artificial Sequence
  Synthetic Polynucleotide
atgcaccatcatcaccatcatggtggttctggtgtcggaaagtggcacataggttttaaagaagggcttcgcccccatgagcgtggcttcgattttcattacggcttcctctctggtgctcggacttatttgccgggcaaagccgacgttgcaccaatcattcgtaatggacagccggtgaccgatgaaaaagagtatttaacggatgcgtttgcgcgagaagctgttgccttcctagaccgctcgcaagatcagccgttttttctgtacctggcattcaacgccgtacacggtcctttagaagcgacagagccctatctggctcgttttccgaatctgaccgggacgcgccggattcatgcgggcatggtggcggccatggacgatgcagtcggtcgcgtgctgaccaaagtgcgtgctcttggccaggaagaaaacactctcatcttcttttacagtgacaacggtgggccaaccagacaaacgactgcgagcaatgaaccgctgaggggttataagggccagttctatgagggcggaattagagtaccttttctggttcaatggaaaggccgcctgccggcgggtgttgtgtaccgtgaaatggtcatgggtttcgattgtcatgcaacagcacttgcggctgcgaacgtcgacgtgtccttgcgcgccccagatgatctgtcacgaagcgaacgcccgaccctggatggcgtaaatctattacccttcctcaccggggagaaactgggacgtccgcacgaacagcgcttttggcgtgccggtgcaaagcatgccgcccgtgtgggcgaatggaaactggttcaggagcgcggtggagaaccggaactatttaacttgaaagacgatatcggcgaacagagtgatctggcagcgaaggagccggcaaaaattgaggaattacaagccgtgttcgcggactgggtgaaagggacgcagcccgctaaatggattcgtcaagatggtagaaatgccgaagtcggcggtaaattgaaaactgggtccgaaagctcaatccctcgccgtcggacaccagttgcgggccgtatcgcagaggtattccgtaacaccgatacaaacaatgatggtcgcctgacccgggaagaatatccgcagccagactcgtttgacgcggtcgacgccaaccgcgacggttttgctacgccggaagaagtacgcgcctactatcagaatcggcgcgggacacgtccttga

SEQ ID NO: 1103 - DNA, 1287 bp, Artificial Sequence
  Synthetic Polynucleotide
atgcaccatcatcaccatcatggtggttctggtcaggagatggccgcacgcttttctaagatagtataccaacagcgtaaattgggtcttctcgatgacgggcggcgtgatgctcgagtccgcggcaccggaggccgcaatccgtgcttcaggcgtccaaacatgcccatgaaaaagattctgacaatcgcgggtactgtttcagtgtcggccgggttagcgctggcgacccctgtggaaccggtttattttacgacgtatattgattgtgtcaccatcgacaaccaatacgtgggcccggatggtgaactgcgatgggacgtagatgcaggttgcgatatttatcaggttgacctgtatgaacgcccgatgacccaggccttcgatctatttagaggccgctttggagcgaaagagtacttcgaatacctggacattgctcaggcgcgtgcaggctttgatgatcgttatttgtatgtcgccatccaattagcgggacgtgaccatgtgacgagtggtggcgatcgggtggagatgggcctggtcgaacgttacggcttcactttaagcacggatcgcgatggccggtttggtgtgctcctggttgccgatcagcctgaactgaaaatagaccccgtaacccgttttggaacactgggtgtcttcgggtatcgcgataccaatggggacgtgggtggtgcggatcgctccggcccgactggtcgagacgttacgaaaagcgacaacccggatgaagaatccggacttaatggctacgataccacaattatctctgatggcgttctcgacgcgaccagccgcgatgtacttttcgtaaggctgtcgccaactgacgatacggtggtggaatttgctttagattacgcagctctggggtttacccgtgacgatttacgccacctaggtagctttgagatcgaggcgattaaaggcggcccgaaggacccccagaactatagatggaacgataaattcagtaaagaagaggccgggtcgcctaatccgggcccagacggacagtctgaatttggcacgggtggcttggaaaatatcgcagaaatggattcagtccgtggtgggccaattgatggcggtgctgtatgtgatgctgacttcgacggcgacggtactctcaccctgttcgattttctggcgtatcaaaacgcctttgcgagtggcgatcgtcgcgcggacctggatggtgacggtagcttaacactgtttgatttcctggcattccagaatgcgttcgccgccggctgctga

SEQ ID NO: 1104 - DNA, 564 bp, Artificial Sequence
  Synthetic Polynucleotide
atgcaccatcatcaccatcatggtggttctggtcgtaatcgcaaattgatagctctgttaggttgcgtcgcacttgtgcctctcgccgcgggagcgctggacccgcaaggccccccgccaggtgctgatgagcgatgggccgcgcacgataccgatggggacggcgccatctcgttggcagaagcggaagcaggcgcgccgggtattgctcgcaacttcgcccggtttgatgccgacggagatggtctggttacgcgtgcagagatgcatacagtaagatccgcggaacgtgaacagcgccaggcacaggccgaagagcgctatcgtaaggcggacactaatggcgatggggttatcgatgctggcgaagcgcaagcaggcatgccgagggtggcagagcgttttggtcagatcgactcagatgcgtctggcaccctgacgcgagaagaactgcgcagcgcgatgcaagctcatagggctgaacgcatgcagggtcagggaggcgcccgtcaaggggctgccggaaccggtgcaggccagggccgccgcaacggtgggcgttga

SEQ ID NO: 1105 - DNA, 552 bp, Artificial Sequence
  Synthetic Polynucleotide
atgcaccatcatcaccatcatggtggttctggtaagcgatcgctcctgcttgcgagcgcactggccttgttcgctacaggcgccactgcacagacggtgacccccgcggaaatgtttatggcgcaatgggacttagatggtgatggagccgtaaccctggcggaggctcgcgaacagcgtggcacgatctttggtatgttcgatgcagacgataacggggcctattcagcggaagaattggcctctatagacgagcataaactgatgcagttagaagcgggtatgggccctggccaccaaagaccagcggggatggctccgccgccgggccgcggtccgggaaatggaccggggaccggtcctggcaaagcaccacaggcccagagttttttccaaccggcagcagagggcatggcgatgtttgatgctaaccatgacggtaccgttacacgtactgaatttgtcgcagggacggatccatggttccaactgcgcgacaggaatggcgatggtgtgcttagccccgctgatttcggtcctccgaaagggtaa

SEQ ID NO: 1106 - DNA, 834 bp, Artificial Sequence
  Synthetic Polynucleotide
atgcaccatcatcaccatcatggtggttctggtaaaattaagatcaccggtcgaaaaatagaagtatccgataaattgaaggagtatgcagaaaaaaggatttcgaaattagagaaatactttcagcaacttatcgacattcacctgatcctgtatgtggaaaagattgatcatactgcggaactcatcattaacggagatgctgttcagttccatgcgcgcgagaaagccgccgacttttactctgccatagatatgctgatcgacaaaattgaaagccaaatcgcacgttataaagataaaatacagagtcgcaaggggatgggcgtcgaagattcgttctcatttgatattagcagcgagcagggtaaagacgcgctactgaatcaagtgtctaacaaacccgttgacaatgtagaagcttttttacagatgaaagtggataagaaggatttcctgctgtttaaaaaaggcgtctcattggttgactcggatgtggattacgcaaacaaaaattatgcggtgatttataaagcgggcgataactaccgtttactggaaatcccgttcgacaaatccaatggtgatagttttagctgtgaaagtttcgtagagtatgatctcaacattctgaacgattctctaacaaatccagaaattgagttcaagcagcgcaacgactgcaatatcgaacggctcaccctggacgaagcgtttgagcttattgataagaacggcgacaattacatcccgttttttaacagcgaatctggatacttcaatgttatttcgcgcaaaggcaaagattatgaagtctttgtacctgccttttag

SEQ ID NO: 1107 - DNA, 2199 bp, Artificial Sequence
  Synthetic Polynucleotide
atgcaccatcatcaccatcatggtggttctggtcggcatgtccgtcgaacgctggcccctttaggtgctcgcttctttgtagcgtcgctcctggcaggcgcgggcacagcgaccgccttgggggacgattactcatggatcgcaggttccggaagctggggcaacccgagtcactgggcgccatttggtcttccgggccccgctgatttcgcccgtattggtaatatagcaggcgttgcagaccatactgtgtttgccgatcgcaacgtgtctgttctaggactgtttctgagcgacgggatgggcttccaaaatgagggttggtcgacgaccgtactgggcccgaccgtgcttgggactggcagtaggatttttctcagcgatgctgtcgcgggatcagatttcatcacacgctctctgtctatgaccggtgataacacgcgaattttcttagaaggttcgatgttgcgcgttcacgacacactcgatatcggtccgggggcaaccctgatttttcgtgatggtgaagcgagaattaccaatagtggcgtgggcctggtgaacgcgggacagatctctgtcgggccaggcgccagctttttcactcatgagggggacgatgccttgatcgacctggatggtcctgctggcggcggccgtgtacttgtgtccggcacgtcctcagcgaccattgcattacgtgcccgcgctctgacggatgcgttcgacggcgaaatagaactcggtagctttgcccgtctgcacatgctgatcgaggatggttgggaagcggcagcaggtagccgcattagagctcttgtgggcccagatgctgaacgcgcggaaatcaatgggcttggtcgtcatttttccctaaacggttctgttgaggtgcgcgctttgggctcgaccggggtcctgcgcattgttcaggaaaccacggtaggcgcgggtgccaacgcaaccgttttcgaacgtggtcaactgcgctttgccgaagtggccttgcgtggcggcactttcacgtcacattccgaaagcctggctcacggtggaacgttttttgacggagcgaccgattggagcggagcggtaacgatcgatggggccgcgcagcagaactgggtggcgacagtctcgaatccgctgggggcaaccattgatgcaggcctattggatatggacggtgaggacggactgactcggtgggcgatcaacggccctctgacggttaatgcgggatcgattaaccgggcggccggcaatcgttttgagggagaattaagtatagctggcggcctgctcgctggcttgaccatcaacttaccgtcaccgactgaaccctggactctggcgggacgtatggacctgagcgggagcgctgttgtagccccgacccgcctgagtggtagcccagtccgggtggagggtgttttagtagttgaaaatggtggttctcgtgtggcaagtgacgtgcgcgtcctgaataaccccacgctggagattgaaagcggcgcaactttacgagcccacggccgcacggcgattggggcgggaaccaccttagtgggagcggggacacttcataacgggaatggcggtaggttggcaattgaagatggtgctatgctggggtctataggtcttcgtaatgatgcgatcctgcgtatgggagaaacgctgggctctgccggggtcctgaccgtcgatagattcgaacaaagtgccactggttcaataacaatggatgtgggcgggccggagagaggccgcgaccatgacgtgctccgcgtaaccggaggaccggtgtcgctcgccggtacgctggtcgttagcccctttgacgctccggacgcggcaccattccgtccgatggttggcgatgaatttacagtccttgtaagcgatgcgccaattgaaggtgatttccaggctctcccggacacgctgcacaatggcctgcgatatgaatgggagacagttcatgaaccgggcgccttggcagtgcgggtcctgcgcgtgaccacggtgggttgtccggccgacttagatggtgatgctaccttgaccttatatgatatgatcgatttcttgaacgccttcgaacagggcaccttaatggccgacattgatggcgatggccatctgactctgtttgatttcttggcgtttcagaatgcatttgccgcaggctgctga

SEQ ID NO: 1108 - DNA, 2355 bp, Artificial Sequence
  Synthetic Polynucleotide
atgcaccatcatcaccatcatggtggttctggttggaaacaagttctgtcgttgggcgtactcttatgcgctgggatggccgcgtcagcagaggacctgcaaacgcagccagatcctctacccagcgtgcttgtggatgtcgcggttgactccggagtggttcgtcatccgctgggcaaggatgccggtgtccggggtgcagatgctgaactggtctattctacagaagtgaccgcgcctggcgcgagttggctgaggttgtggtttgaccgcgcagatttagccggtaccccgggcgtggacgggtcttacttgatcattacttcgcttgaagacggtgcttggcagcgtctggatggtgagcacattcataattggagcatgagctcagcgtatttcaacggcgatagtgtactggttgaactttgggcctacccgggcaccggcgataaccgcgtggcactcacgcgtgtcatggcgggggaagaaccggccggtgttcgctccatctgtgataccactgacgatcgagtactgtcttatgatccacgtgtgggtcgcttaagcagcggatgcacggggtggctgattgaccacggcgggtcggcgaatcgcctgttgacggcaggacattgtatcagtaactcaaccacaggcgctgtgatgtttttcaatgtgccgctttccagctcgtccggtgcgtttagggcaccgcccccggagtatcagtaccccgtacagaacggttcaattcaaagttccggcagcggtggcgtcggcaatgacatggccacttttcagacccattctaacagtaatactggtctggcgccgatgacagcacagggatcggcgttcgttttggcgtctgccgctccaagcgccagcaaccaaccagtacgtgtgacaggatttggtctgcgagatgccaacttccctcagatcccgcaggaatggtctaggacccaaaaaacccacgccggcccgtttacgtctcgcaccgcgacggctatacgctaccgtccggacacgaccggcggcaattcagggtcaccagtcatcttagaatcgaccggccaagcaattggtatccacactcatggtggctgcaacacgactgggggtagtaatgcgggcaccactattgagcatccaacgctgcaaggttatctttcgaccccgctgggcacaagcattgcgcagacccctcttctggaactctccacaatcttcgctagtaataacggaggcaccgtgggtggcgcagtttattttgatgtcgcggttggtccggcttcgcagcgtatacgcgctctggaattaaacattgggagcgcgctatccaccgagttccaggtttccgtgtaccgcaccgctgggactgccgttggcaaacaattgtcagcaggacagtggaccctggtcggtagtggctctggtgttgctgccggtacggatgaaccgacgcgaatcgtactggcaaccccttttgtgctcgagggaggggaaagctacggacttgctgttgtcctgacaggcgccgcccatcgttataccaacgcgacggccagcaacaccgtttatcactctgatgagatgacgctgacggcgggaagcgcatcctcggccgctttcggcggaagcttatttaacgatcgggtgtttaatggtcgtctgttcagccagcatgtaggtgactggattgttggcaatatggtggggaacgatcaggcgacttcagccgaccttaaaggtggccgcatcaaagcaatgggttttaccatgccagcaggccagtcggtaccactgggggcggtcgaattgcgactcgaacactttggtccccagacaaatccgttagtgcgcgtgtacagcggcgccgcggctccgaccactctgctgggcaccctgtcaaatccgcccatcgccgctggactaggaaccgatttctttacaccggcgacgccagtcttactgaacccggggacgacctattggcttgtggtgtctaatgccggccctgatcgtatggattggatggcgaataaccccgccctgactcctggtggctgggcgtcgcacgcggggagcttattctcaacctctagcggcccgaacccgccgagtgcaggtaacaccagcgttattttgaatagctatgcggtgtacgtgggaacggcgaacccatgcgcggcggacattaacggcgacggcctcctgaatttctttgatattagccaatttgtaaccttatttcaaagtcaaaatcctgctgccgatttcaacaatgacggattattcaacttttttgactttagtgcgtttttggcagctttcaatgctggctgtccgtga

SEQ ID NO: 1109 - DNA, 333 bp, Artificial Sequence
  Synthetic Polynucleotide
atgcaccatcatcaccatcatggtggttctggtctggccggtcgcgacgctgatggaaacttagtagcgatcgatgtttcggatattgacggggatggcaaacttgacttggcagtgtttgagggcgcgtcttccggtctgctggatgcctcagatttggctgacgccgcgccggcaatagaacctggcagtagcgcgggtattctcatctatgaaaatacatgggcaattccattcgtcaacgcgctgcgaggcgccgatgcaaatcttgtggcggctggttttatcccccaagacgcgctgctcgctagcctggacgctactggggattag

SEQ ID NO: 1110 - DNA, 1233 bp, Artificial Sequence
  Synthetic Polynucleotide
atgcaccatcatcaccatcatggtggttctggtaagcaaacactcttgagtattctagtgctttcgttttgcgcgaccaatgttatagggcagtgtggatatgcagactacggtggcactggtgcctattgcatcgctaactccgcgtcaggcaactgtgtccctacctacgccttcattcgggataaattatggacgtgcggcccaagccccaatgattgttatcatgacccgggtctgccgctgatggtaaaaaaggcgtctgtgtggtacgttagctttccggatggagcaacgacccagtggacggtcaccgagactggcgaatgccaacacatcaccacacctgatgtgtgctgtaccggtggcactacgtataacccgtgctggcccgggttcatttgcccaatggttggcaatggtatcattactcagaccgtctcagcgggcgtatggaactctgatgttcgctcctgttgtatttcggccgcggactacggaagtccggggctgggtgcaagcaccacaaaacagttaccgcatacgtgtgctaccggtggcgggggcagctcagcatgcatttacatatctggtagtaatggttttgaaccggattataccagctatccagtggacggctgcgaagacggcttttatgataaccacaacggtaatcctgattgttgtatcgccgcgtctccgatcctgatcgacgtgtcgggcaacgggttcgatcttgtagacctgaataacagcgtcggattcgattttgtgggtgatggacatccgctgtcggtgacatggacggcgccaggcagtgatgacgctttcttggtcttagaccgtaatggaaacgggaccattgataatggtgcggagctgtttggcaacttcgccccgcaaccccctagcggcggacgcaatggctttattgccctggctgaatacgacaaacgtgttaacggcgggaactataacggccgaattgaatcccacgatgctgtgttttccagtctgcgtttgtggcaggatgccaaccataatggtatctcagaaccggtagagattcacactcttcctcagctgggggtgcgcgctatcgatctcgattatagggagtctcgccgagttgaccagtacggtaaccgtttccgctatcgtgcaaaagtttacgacgcccatggggcctccgtttcgcgatgggcgtgggatgtattctttgttaaacaatag

SEQ ID NO: 1111 - DNA, 549 bp, Artificial Sequence
  Synthetic Polynucleotide
atgcaccatcatcaccatcatggtggttctggtccgggaaaattagcgtggatagtttccggttgggccaaggagttcgtctctaactgttataatagtacgccatcgcagcaaggggacacaacttgggcttttagcgcaatcccccctaaacaccgggcgcgtatgtttccgccggtgggccgacaggatgtagatccgcgcaaccgctcaaaagaagaacgccaaatgagcaagaccttcgcatttcgtaatgtggccttgagtctcgcggctggcctggcggttgtgaccgccacgcatcatgcccacgcagccgagacagaccaggataaagcggctgcaaactttcagctggcggatgccaactcagacaatgcccttagcaaatcggaatttattaccttcattgatctgtctgcggcttccaacctaggtcgtgcagggttaatcaaaaagaatcggcgctacgatacggcgttcagccgtttggacgccaacaaagatggcgcagtcaccccagcggaactgtccgaagtcggtttttaa

SEQ ID NO: 1112 - DNA, 636 bp, Artificial Sequence
  Synthetic Polynucleotide
atgcaccatcatcaccatcatggtggttctggtaacaagaaatggcttatctcgggaggggcggtactgacagcagctgtcgccaccgcggtggcatttgccgctccgggtccaatgggtaaagcggactcagatggcgatggcgcagtttctaaagcggaagctgtggccatggcgaataaccacttcgccaggatggacgttaataaagatggccagattaacgcggctgatcgagaggcgaaacataaggaacattttgcggccatggatactgacaaaaacgggagcatttccgaagcagagttcaccgcggctcacgaagcccgtaaagagaaacgggaagctatgcgcgaaggtcataagggcatggctggtcacggtgcagagggccatgtaatggaagccggacctcgccacaaaggaggccgtggtcataagggcgggggtatgatgatgctcaaaatggccgatgcaaatggcgacaaaacgataacgaatgcggaaatgatggccgcagtcgatgcgcattttgcgaaagcagacagcaacaaggacggcaaaatcagtgccgaagaacataccgcgatgcgcaaagctatgcgtacacacatgaaggcacaacccgcacagtaa

SEQ ID NO: 1113 - DNA, 462 bp, Artificial Sequence
  Synthetic Polynucleotide
atgcaccatcatcaccatcatggtggttctggtcttgtgtatgatttcgacggagatggtgataacgacgtcctctcgagctctgcgcatcgttttgggatatggtggcacgctcaaactccggacggctggattacacatacgatcgatgataccatttcccagacccacgccgtatgcttagcagatatcaatggcgacggtctgatggattttgttacgggcaaacgatggtgggcgcatatggggcgcgacccaggtgccgaaatgcctgctttggtggtttggtacgagctgtcacgtaaggacggcaaacccttctggaaacgccacaccgtcgataacgcgtcggggattggcactcagtttgaagtggcggatgtaaatggtgatggactgctagatatcgttaccagtaacaagaaaggtgtgtattgtttccaacagattagacagccgtaa

SEQ ID NO: 1114 - DNA, 714 bp, Artificial Sequence
  Synthetic Polynucleotide
atgcaccatcatcaccatcatggtggttctggtggcgagcaagaaaccgccttaactggacttacgatgccgcaggcgcagccccaagggtggatccgtctcgaagaatcggatggttatccaaattttttcaccgttttgcctgacggccggctacgcgaggcttttctgccggataacgcagacctgggtagcacaccggcggatgactggcagacgaccgattacgaaagttgcggcaacactcttcctcgctcacaggtgctgctgcatggggagccggtagcattattgcaagttgtctccaatgcccagagcatttgtcaaaccgatcgacaggcctgcgcgtctgctctcttcgcgggtatagatgtgagtggcgatggaaacctgtcgacggcagaaattgcgcgtttgctgcgtgtcgcgggttatgtggccgcagttagcgaagacactccagccacaaatgatgaactggcaggcgtactggccgctggcctgccgatcggtcctctcatggcgagcgcgattatcaactcctttgactacgatgacaacggtgtggtgtcattggctgagctgtctcaggaccgcggcaccctgattaatcagcttgaaccagataccggagatgaattgaactcacggttaaaccagatgaaagaagccctgaagccgctagggcgctttctggagaatttcggccaatga

SEQ ID NO: 1115 - DNA, 1293 bp, Artificial Sequence
  Synthetic Polynucleotide
atgcaccatcatcaccatcatggtggttctggtaatgcgactgcactgtcgttcagtcaaggttattcccagccagtgtctcgggacacagggacgcccggcgttgtagcttcagccagcagcccggcgcagccggtgatggtcggaggcggtcgcttagcccctgctggcggggaaaccattgatacctttgtttaccaatctgtgagtgagcgtgtaagctatagcgcgcagtcggcagccgtccagtcccgtggtggcgatggtgcggacaccgcatcggccgaatttagacagcttacgttcgattttttcgcggagagtcgtactgaagaattggctctgtttcgcaaatctaccggcgcggcagccgaatctatgggatcagcgcgcgctagtagctttcaagcagtgtcgaggcgcgttgagatacgattctccctcagcgccgaagtctcgggggccgcgctgcaaggttttgcgaaggccgcaaaagatctgccggaagcttccgacaaagcgtttggcgatttcatgtcattcacacgggaagcgctagaacgtgccaacgaggtgatgggcaagctgttggaattaatggacggttttttcaacggggagggtgatttcgagactcgtatgcgctcgctactggacggcttacagtccgtcggtctgggtggcgggagtgccgcacctggaccgatgcagcttcagaccgcgggctttagcgttcaaatggaatttagctttgtgtcggaacaattcacggtaaatgcacagggtgtccaggagtcagatccaatcgtgcttgatctggatggggacggcattgaactcaccggctacgctgatggcgctcgctttgatatcctggggaacggacgtgccgtgaatacggcctttgtaactggtggtgatgcgttcctcgcgattgacaggaacggtaacggcatcattgactccggtaaagagttgtttggcgaccaaaatggcgcatctaacggcttcgaagaattacgcaaattggatagcaatggtgacgggcgtattgatcgcctcgataaagaatttgggtctttgctgctgtggaaggataacggcaatggcatcacggaagagggcgaattactgacacttgaacaggcgggcatcagcgagatttcactgggttatcgtaatgttaaccaggctgccgcaggaggtaaccgtatcacccagatagcgagtttcctgcgcacggacggtacccgcggtaccgccgccgacgcgatgctgagctatctcgcgtag

SEQ ID NO: 1116 - DNA, 627 bp, Artificial Sequence
  Synthetic Polynucleotide
atgcaccatcatcaccatcatggtggttctggtcaagggtcacgagcgttgctgcaaggagcacttgaccgtgctccattcgtcctgaaatgttcgagttggttatttgatcggggcgatgccggtgattgctggcagggctctggtaagtggcgtgtgaaacacgtaccctttcagacacgcaaacagccgcatgcgctcagcatagttttcctgcatctgtttgacgccgagacgcttactgataacggcgggaggatgaccaaaaccatcgctctcagcattctagcgctgctgctcaatgcaggcgtgtgcacggcaggcgattcctatgacgcgcacttccctgatatggacaccaacggagatgcgcaggttgtgaaggaagaatttacagcctactttaaagacaattccaaaccggatgaggctttcgccattatcgacgccgataagtctggtggtatcgatcataacgaatggcacgcatttaaaaatgcgcatggatatggtcataaagatgggatgaagcacatggacggcaaaccgcacatggaaggcatgcctcatatggatggtaaaccgcatatggaaggcatgccacacatggaaggttcgaaaccgtga

SEQ ID NO: 1117 - DNA, 498 bp, Artificial Sequence
  Synthetic Polynucleotide
atgcaccatcatcaccatcatggtggttctggtatcagcggcataagtgggacaaataacctttataacctgtcagctctcacgggatcgcggactcgcacctccggtgcggcacaggatgacccaatgaatgtcttcagcaccgtagatcaagacggctctaacagtgtgtccgagagcgaatacggtctgttgtcggaagccattgcgcaggttacgggcaccgaactgaatagttctttttcggatttcgaccagaacggtgatggggagttaagcgccggcgaactgaaactggccatggaagaggcgggatttaagcccccgcctccgccgccaccgccggctggtcaagtgagcgcggcatattgggcgcagtcacaaaaaacgccccagtcacagtcaggtcaaagctctcagggctacgggcctgatgttttagcacaggtgttggaatatatccgtcagcaatccggcaacctggatattaccgcctaa

SEQ ID NO: 1118 - DNA, 594 bp, Artificial Sequence
  Synthetic Polynucleotide
atgcaccatcatcaccatcatggtggttctggtacattcaccctgcgaacgttgactgcatcctcgatccttgcgctcgggctgggaggcttaccggcccatgctcagaccgatgcaacgaccggtagcggcgcgacaacgacctctggtgccgcggacactccagctagtagcggtatgtcaggcatgagtggcataaccggagattttacctccgcggatagcgacgcctcgggcgatctgtctgaagaggaattttcgactgcctggttcggtgtactagactctgatggtgacggggctgtcagcgaagcagagttttcaagtgtgatgggggatgaagatttcgcggcctgggacacagatggctctggcgatctgtcagaggacgaactgcgcgcggggatgacgactgccggtagctttggagattgggattcagatgcatccggctccttaagcgaaaccgaatatgacgctggttttgacaccatgaaccggagcgacgttggtattacgggcggtagtgcaacgggtacggataccggcacatcggatggcaccacaggaaccagtggtacggcgggaaattga

SEQ ID NO: 1119 - DNA, 2463 bp, Artificial Sequence
  Synthetic Polynucleotide
atgcaccatcatcaccatcatggtggttctggtgaaggtatgcttaaaggagaaggccccggcccccttccgccgttattacaacagtacgtcgaacttcgcgaccagtatccagactaccttctgttgtttcaggtaggcgacttttatgagtgcttcggagaagacgctgaacgtcttgcccgtgcgcttggattggtcctgacccacaagacatcgaaagatttcacgacgccgatggccgggatcccccttcgcgcctttgaggcgtatgcggaacgcttgcttaagatgggatttcgccttgccgttgcagaccaggtcgaacctgccgaggaagccgagggtttagttcgccgcgaagtgacgcaattgttaacaccgggaacgcttttgcaagagtctttattaccgcgcgaggccaattatttggctgcaattgctacgggcgacggatggggtctggcctttttagacgtgagcacaggcgaatttaagggaactgtcctgaagagcaaaagcgcgttatatgacgaactgtttcgccaccgccccgccgaggtcttattagctcccgagctgcttgaaaatggggcgttccttgacgaatttcgcaaacgtttcccggtaatgttgtcagaggcaccctttgagcctgagggcgaaggcccgttagctttgcgtcgcgcacgtggcgcactgctggcttacgcacagcgcacacagggtggagcgttaagtcttcagccgtttcgcttctatgacccaggtgcgttcatgcgtttgccagaggcgacccttcgcgcccttgaggtttttgagccccttcgtggacaagatacgttgttcagcgttttagacgaaacgcgcacggcaccagggcgtcgcttgttgcagagctggttacgccatccgcttcttgaccgcgggccccttgaagctcgtctggatcgtgttgagggatttgtccgcgagggtgcattgcgcgagggtgtgcgccgtttgctttatcgccttgccgacttggaacgtttggccactcgtctggaattaggccgcgccagtcccaaggatcttggggcgttacgtcgttcattgcaaattttacccgagcttcgtgcgttacttggtgaagaagtggggcttcctgacttatcacccttgaaagaggaacttgaagcggcgttagtggaagatccgccactgaaggtgtcagaaggtggtctgatccgtgagggctacgatcctgacttggatgctttgcgcgccgcacaccgcgagggtgtagcttacttccttgaattggaggaacgcgaacgcgagcgcactggtattccaacattaaaagtcggatataacgccgttttcggatactacttagaagtgacgcgcccgtactacgagcgcgttccgaaggaatatcgccctgtccagactcttaaagaccgccagcgctatacattgcccgagatgaaagagaaggagcgtgaagtttatcgccttgaagcgcttatccgccgccgtgaagaagaggtctttttggaggtacgtgaacgtgcgaagcgccaagccgaagctcttcgcgaggcggcgcgcatcctggcggaattagatgtctatgcggctttagcagaagttgctgtacgctacgggtacgttcgccctcgttttggggaccgtctgcaaattcgcgctggacgtcatccagtcgtcgaacgtcgcacagaattcgtgccgaatgaccttgaaatggcccatgagcttgtcttaattactgggcccaacatggcaggcaagtcaactttcttacgccagactgcccttattgccttgcttgcacaagtcggctcgtttgtacctgcagaggaggcccatcttcctttgtttgacggtatctatacacgcattggagcttccgacgatctggcaggcggaaaaagcacgtttatggtggagatggaagaggtcgctctgattctgaaagaggcaactgaaaattcacttgttttattagatgaagtgggtcgtggtacgagtagccttgatggtgtggccatcgccaccgcggtcgcagaggctttgcatgaacgccgcgcgtacacactgttcgctactcactattttgaactgacggcattaggcttaccgcgcttaaaaaacttgcatgtagctgcacgtgaggaagcagggggtctggtgttctatcaccaggttttgccaggtcccgcgtccaaaagctatggagttgaagtggctgcgatggcgggtttaccgaaagaggttgtagcacgcgcacgcgccttgcttcaagcaatggctgcacgtcgtgaaggggcattggacgctgtgttagagcgcctgttagcattggatcctgatcgtctgacgcctcttgaagcgcttcgtcttttacaagaactgaaagcgttagcgttgggagcccctttggacaccatgaaaggc

SEQ ID NO: 1120 - DNA, 813 bp, Artificial Sequence
  Synthetic Polynucleotide
atgcaccatcatcaccatcatggtggttctggttttgaagtaatttcagcacgtcagtccagtgcgcctaccccgcggtcggataacttggagcaacgcctccagagcgacatcgaagcctctcttgattatcaaatactgcgtcgcacgctgggaatcgctagcgaagcggccccaccgaaggcgcccgtcgagaaacagccggaaacagcaactgatcccgagcagctgttagaaaccgcagctcgcgacgttgcccgtttcgaacaagtgctgtcccagcgcgaattacaggtggaaattggccaaccggcgacgcctcaggtttctgacccgttggtcctggatctggctggtaatgggtttagcaccactggcttggagcgaggtgtgcgtttcgatctaaacggtgacggccgacagacgcttacatcgatgccatcaggggatgatgccctgttagcgatggaccgcaatggcaacggacgtattgacgatggtcgcgaactgtttggcgatcagcgtggtgcggccaatgggttcgcggagctggcgagactggatgcaaaccgcgacggccgtctcgacgctcaagatgcagcatttcagcaattgcgcttattgcgctttgattcgcagggcaggcaacagctgcaaagtctcgagcaggccggggtcagcgcgatcaatctgcgtgtgcgggatgtagacattgccctgggtgcatacgatcggattgctcagctgggttccttcgaatttgcagatggccgttccggtcaggcggctgacttgctcctggctcagcgatag

SEQ ID NO: 1121 - DNA, 711 bp, Artificial Sequence
  Synthetic Polynucleotide
atgcaccatcatcaccatcatggtggttctggtccgcaccttggtggggtgttgggagtcggccagatatttgttcctacccgtgacggcactacaggtgagcgccgattccgcgttatgaacggtcggcaatttcgtttagcgcgcaccgattggcgtgaaccaatgcgcctggggttcaagacgagcacggctatgatggcagccctgatggcggccaccctctcgacggcggccctggcagaaagagcacccatgggcggcatgttgatgaattttgatgcgctggacgctgatcagaacggtcaaattaccaaagaagagctggctgcccgtcatgcggcgcgattcgccgaagcagatgcagaccaggatggaaaactagctgcggaagaaatgatcgcgatgcgtgataaaatgcaggccgagcgcaaggcggccagagcagccgctatgatggccgagatggacgcggatcaagacggctttatttcaccggcagaacttccgggctctgcgatgatggataaaatgtttggtcgaatggatgacaatgcagatggggctatctccaaagaagaaatggaggccgtacaggcacgcatgcaaaaacgtatgggcggagaaaaaggtcatggtaagggccatggtaaaggtcacggcagcggcgaacgtgggggattctggcagtggatgggcggtgatcagtaa

SEQ ID NO: 1122 - DNA, 855 bp, Artificial Sequence
  Synthetic Polynucleotide
atgcaccatcatcaccatcatggtggttctggtcacctgactttgaaggatcatgcgatgtggccgctcttacttctggctgccatcctgggatcactcttcgcatttgcgtttaattactggcgttatctgaaaattagtgaggcccccatatcttcgattgcggcagctgcgcaaggctatattgaactgcatggtgtggcctacacacagacgtccctaaaaaccccattccagggcatcccgtgcgtctggtatcgagcatgggcctttgcggacgttaaagaagggagcaaaacccctatcgatattcgccttttagaatacctgcaatccgacgatatcttccacttgaaggacagcagcggttcttgtgcggtaaacccgaaaggcgccgagattatctacgctgaggctcgcacgcagcataaaaacgaacaccggtatgttgaagaatatctgcccgcaggtaaaccgctgtatgtgttaggtcatctggattcgcgtcacgaactaagttctcctgatgcaattaagaaagatgtcaataaactgattggcgagtggaaagcaaacccgaccaagatgctcctgcgctttgatcaggaccgttcgggaaaagtggacatgcaagaatgggaacaggcgagactggaagctcatcgtgaagtagggataaaacaccaaatgcaggcgcatactcagatgtataccttggccaaaccggccgacaatcagttattccttatttccgcgctgtcaccgcatgctctgcgcatgcagtaccaatgctggatttttgcccatcttacgatcttaatcctcctgctgctgatttactttagactagcatga

SEQ ID NO: 1123 - DNA, 906 bp, Artificial Sequence
  Synthetic Polynucleotide
atgcaccatcatcaccatcatggtggttctggtaagtccgctcgtggaataggtgaaaaaatcggcagtcctgggtttaccttaatggagcttctgattgcaatgctcgtaggcttgatggccgttggtgcggtgtacggcgtctattcgacgcaactgcgcggtcaccggcatcatcaggtgctgctggaactacagcagaacctgcgtggggcgatggttattatggagcaacagatccgcatggccggcttcgatccagaccgatcaggtgcgtttggcattacagatgtccgtcgctatagcttagtgggcactcaacccgatgtggacgggatgccgggttttttctacaccttagatctggacgaagatggcgttcgcgacccgcgcaatggatatcgtaaccgggaacactgcaattttcgtatccgccatgatgatggagcaggcagatggttcctggcctgggataacggtatgggccgtcatccagtagcagaaaacgtgcgcgtcatggttttggcttacgcggtcgaccgtgatggtgacgggcgactcgaccgctggcagggtggccctcacgtgatttgggctgtcgattctactaatgacaacatgctggatacccacttagatgttaataatgacggcgttattgatctgagagattttgcggatggcgccgtgcgtatcggtgccgtagggggtagcgccattgtgccgccgatccccattgatcgcatccgtgcggtacgcgtgtggttgctggctgaatcgcgacgcccggttcgtggacatgcagacattggtacgtatgtcgtcggtgataggcttatttgtgggaacggcgacggccatttgcggagagtggtagagacggttatcgaatgccgcaatctgtaa

SEQ ID NO: 1124 - DNA, 519 bp, Artificial Sequence
  Synthetic Polynucleotide
atgcaccatcatcaccatcatggtggttctggtaagccattctatatacctatccttaacctcacattagctacggcattgagtgcgttttccgccgcgtcggccctggcagcgccggatgtaatgccggcttttaaaactaccgactcaaatggagatggtatggtcagcctggaggaatttcaggcccaaggcggggttgaaaaagcgttcgaagagggcgatgcgaacaccgactctcagctgtccctggacgaatacacgaaagccattgcaaataacgatcgcattaaagctggtaagtatatcgatgatgcgtggattactgcacgtgtgaaagcgctgatgctaaaagacgaaggcgtgaaagggcttgatgtgaatgtcgagacacaccgaggcgttgtccaattagctggttgggttaacaccccggcccagatcgctcaggcagaaaaaattgcgagacgtgtggacggagtaaaagccgtgaagaatgatctgagcgttaaacgctga

SEQ ID NO: 1125 - DNA, 1479 bp, Artificial Sequence
  Synthetic Polynucleotide
atgcaccatcatcaccatcatggtggttctggtgcgattcgcacattggcttccgtctcggcactggccctcagcgtggtttctggggcgtcagccgcggtaataaacgtgcccggagacatcgcaagcttaagtgttgctgtagcggtggcagccgatggtgatgaaattgtcatcgccgcgtctggtgcgccgtatcttgttttcccaggcctgcaagtgacgaataaaactctaaccattcgtggcgctaccggcaaccctgctgatgtcgttatagacggtgcagggctggatattgtgttgcgaattgcgggcagcggctccgacggtaccgtgctggagggtatcacgctgcaaaatgggcgtggtgcaacggccaccaactcgagtggcgcgggggtttttattaatgatgcaaacgtaactatcagggattgcgtgatccggaataacgtgatcccgggcgccgacggaaatggagccggcatttacgcaactgtctctaacgttgaaattcagcggtgtgtaattgaaggtaatagtatcgacagcgcttcaggtgatggcgtgggagcatattttaacggcggtttacagcgcattaccgatacgatcttccgcgataaccgtatttcaacctccggtgatctggatctcagcgctgtagggggcgggatgtacgcggacgttggctcgatgctgcttacgcgttgcctctttgagggcaatcgaacaggattcggtggaggcgtggctgtgattggcaacatgcagtcggtcaccatcgacgaatgtgagtttgtcgacaatgaagcccgcaatggcggtggcttcggtgcgaacagcacggcgggtccgctagtccctcgtatccgcaactcgttgtttgtgggcaacatggccctgaacgattctgccatatttaccgataagggcggtttctttacaaacctcaccatggcggggaatatctccagcggtagttatgtggtgggcgggagcagtccgaccggtactacagttctggataacagcattatttggggtaatacctacaatcaggccaatggcccaataccgactaccacacccgacgtagtcagatggtgcattcttcaagatccgtatacgggcgctgtggggtcactggcgaaccaggttatcgatccaatgttcgttgatgcgtccaatcgtgactttcgcctgatgcctatgagtccggcgatagacgcgggtgacactaatctttattttggtccgttcgcggacttagatggagctccacgcgtcgttgatgtgccggcggtagcagacaccgggtttaccttatctggccctgtcatcgatattggcgcgtacgaatttcaggttgaaggaccgacggacacgtgtccgaccgatgctaacggagatggcgtgattaactttgccgacctgaatgccgttctgtcagtattcggcacggattgcgattaa

SEQ ID NO: 1126 - DNA, 714 bp, Artificial Sequence
  Synthetic Polynucleotide
atgcaccatcatcaccatcatggtggttctggtaatgcacctcgcacgctcatcgcgggtggagccgctcttctagcgttggccctggctacacccgcggtgctggaggcacagcaagacgggaacaccggccgtcgaggtggccgtggcaacttcgatccagcggaattttttagccggatggatgccaatggtgacgggagtctggatgcgtccgaatttagaggcggtgaagatcgtttcaaagaggctgacaagaacggcgatgggaaagtttcgcaggaagaaatgcaggccgccttccaagcgcgcatggagaattttcgccgcggcgaccgcggtactggagatggcgcaccgggctttggtccgggtaacttcgtcgaccgtttaaaagaaccgctgggcgtatcagaggaagaatgggcaattctgcgtccaaggttagaaaagatagctaccctccagatggaaatgcgaccgggagggggacgcggtccgaatgccgcagcggcgatgccagaggcggaagcgctgaaagcgacgcttgatcgtcccgaagctaccgcagaggaaattgccgcgaaaatcgcagacttacgtaaagctcgggaaaagaaacaagccgatctgaaagcagcccgtgaagagttgcgcgaactggtgaccccgcaccaggagggtgttcttattctggagggcgtcctggattga

SEQ ID NO: 1127 - DNA, 537 bp, Artificial Sequence
  Synthetic Polynucleotide
atgcaccatcatcaccatcatggtggttctggtcgcaagtggcgtttcgtgcttgcagtcatattatgcgtagttttctttacttttacgtctgtgggagctacagaaattgcctccctggagtcagcgggtggcaaagttatcttggattggaatgacaacaccgaaagtgatctgaccgggtacaaagtctatcgatcggtgagccaagagggtccgtttgatgaaattgcgcaggttagcgcctcctattacgaagacaacgacgtggtagatggccgtacgtatttttactatgttaccgcggttgatactagcgcaaatgaatcagcaggctcgaaaaaggcctacgcgagtctccgcatgccaggtgacatcgatggcaacgggttagtcgatttctctgacctcgctctgtttgcgcagaattggctaatggcggactgttggtattgcgatggaggcgatctggatggaaacgagcaagtggatttctatgatttgatgattctggctgaaaactggttagacaaatag

SEQ ID NO: 1128 - DNA, 939 bp, Artificial Sequence
  Synthetic Polynucleotide
atgcaccatcatcaccatcatggtggttctggtttccccgctcgttgggtcgcggaatggcgacacgactatgcaaacctggccctaggcggtggaaatttacttatcttgctgttggggctgcaactccagtcgcgcattggctggcagatcagtctgacgctggttggtctgacctcattttgggcgtggtacgccaacctgaaacggtatagaactgtagcagatacaccaacctcccgcattgcgagcgcccctcaaggctacatagagattgtgggccgtggacagcagccgccgggtgcgacgttaaccagcccgatcaataacctcccgtgtctctggtatcgttaccgcattgaacgcaagaaaggcgatcgttgggaacatgttgagtcagggatctctcatgatagctttggtatttcggacggttccggcctgattcttatcgacccagatggtgctgagatcatgacctctaggaaacaagtgtctaatacgggaggctatcgtaagactgaatggaccctgattgaaggtgaaaccatttatgtcatcggtgaacacgtaacgttagatggccctaacgctgtgctggataaaaaagcagacctggcgacactcctgaccgattggaaagccaataaaacaaccctacttgaacgcttcgacgctaaccgcgatggcgaaataagtttgaatgagtgggatcgtgcgcgtcaggcagccagcgacgaggttgatcgggcacatctggatattcggttgaaggacgggatccatttaatgaggcgtccggcgcacggacgcccctttctgattgctaaccgggaagtgacggccctagtccgccacttccgtctgtggtcgtgggttcatctgttactggtgctggcgactctgctaggcatgatgttgattgaccgcccgacttga

SEQ ID NO: 1129 - DNA, 1842 bp, Artificial Sequence
  Synthetic Polynucleotide
atgcaccatcatcaccatcatggtggttctggtggcgacgctttgtccatgcggcgattcctcttttggcttgttggagggtcgttaggcggtctggcggcagaagcgctggcccgtgtaggtgagggcccaggtgccggaggcgatcgtagcgctgcgcctcgctttacactggtcactccggcagcggggctgagtaatgccacgttcatccccaacaccggttatccggcggaaaacgctatacaggcaggcggcgtgggtattggggattttaataacgatggatggccggacttatttgtgccgtctggcgggaccggtcctgataaattgtacattaatcgcggcgacggtacgttcgttgatgaaggggccgcgtggggcgttaacaagtggtcaagagcagcaggagtcgctgtgggggattttgacggcgacggttatctggatatctactgtgtcaattatggtgatttcccattcccggccgcggtaggccgcagtaaactctaccgtaacttaggtccagatgcgaatggacaatggcgctttgtggatgttgcacagcaggccggtgtcgcgaacgtgttcggtgtgattggcggcatgggcgccgcatttggtgactatgatctggacggccacctggatctattcgtgagcacctggatctttttccccggcggtaaccgtctgtttaggaataatggtgacggcaccttcacaaacgtttctcatattatgccgcaagagcagtttcctttacgtggtttcactccgaactttgccgatattgatgatgatggttggccggacctactgctgacgaatgacttttttacctcacgactttaccgcaacagcggccgtcggtcggatggcacctttgctttcgaaaacataacgcaggccgccgggatcacacgtgactgcaatgggatgggagcgacgttggcagacctggacggtgatggacgcctagattggtttatgaccaacatttatctgccgaaaggttccccaggatgcgcgaatactctgtaccgcggactaggcgtggtagagggcgtcgcgcgcttcgaagacgttggtgtagcttccggcgcgggggatactggttgggcctggggtgtcaccggctttgatgtcaataacaacggatggaccgacctggcagcagttggcggctggccccgttggccgggtacccctatgaggctctatatgaataacgggaatgggacatttactgatcgtgcccaaagcgcgggtgtggcgtggaccggccaaggacgcggtcttgttcattttgattttaataatgatgggcgcgtcgacatgtttgcggtgaacaatggcgccgtgggacggttgtaccggaacgattcgactggtacgggccactggcttcgtctggatttcgatacgtcaacgcatccgtgtgcggcaccacgcggtgtaggcacccgcgtttgggtaaccgctggtgaccggacctggatgcagctgcttgatagtagaacaacctatctgagccagtctgaacagacattacacttcggccttggcaacgcggaagcggttgattcggtggaaatccgttgggctgacggttctgggacaacgctgtatgatgtggctgtcaaccaacgattgactgtgcaggcgttccatgatgctgatacggatcgcaaccgtcgtctggactttttcgatattgcagcttttttaaatgcctatatcgccggcgacgccgctgccgacgcagaccgcgatggtgtagtaaccccggcagacattgggcgttttgtagagcgcttcagagcgggatgcccatga

SEQ ID NO: 1130 - DNA, 537 bp, Artificial Sequence
  Synthetic Polynucleotide
atgcaccatcatcaccatcatggtggttctggtgaagcacccgagacggaagaatccatgaacgctatacgactttcattagccgcgggagcgctcgccttcggtgggatcttgtttgctcagaccactagcggccaagatgcatctgcggcccagcagcctgcggcgggcgccgcggttcaagcaccagcgggtccggggtacggcccgagggacggatcgggtccaggcgagcgtatgcacagacatcatcgtgaaggtaaacacggccatcggggtggaatgatgatgggcgcagatggcaatcgcgatggtaaggtcagtcgcgaagagctgctgagcgcccagaaacgtcaactggctatgtttgaacgcgcggacgccgacaaagatggtacactgacccgtgatgagatgcgcgctgcccgtgaagcgatgcgcgaagagtatcgcaagcgtaaaggggagccgcgcagggatggcgaacgccgagccccgggggcaccccaagctccggcaggaggcgctcagggttaa

SEQ ID NO: 1131 - DNA, 519 bp, Artificial Sequence
  Synthetic Polynucleotide
atgcaccatcatcaccatcatggtggttctggtggacgtaaaaatcacattctgaggcccatcttcgcaccttttggccgagagaacgaaaacatacgttttttaactgttgggtccttcatcggtgtaggctctatgaagaatattaaactttacgtcctcggtacggtgctggtgagtgccctatcagttccggtaagcgtgcgcgcggaaaacgtcgctgataatgcggccaacgacgctatgaaaagaccaccggcaggcgaacgtatgattgaggcgctggatacagataaaagcggggacgtttcgttggaagaatttcaggcgaaacatgccgagcaattcaagaccatggacgcaaataacgatggtaaactgaccaaagatgaaattggtaaggcgcatgaacagcgcaaagccaaaatgaaagaacggatgcacgagaaacgcgaacagatgaaagagaaggcagccaaagaggctgcgccggcagaagaagcacccaaagcggaataa

SEQ ID NO: 1132 - DNA, 1368 bp, Artificial Sequence
  Synthetic Polynucleotide
atgcaccatcatcaccatcatggtggttctggtgcccgcattaatgggccgaagttgcttatcctggtcagtttcctcagcttattttttgctttcacttcagtgtttgcggaagactattcgtctacaagctttatactacgtgatcctatcgttgcaattgagggaggccgatccacgagttcgtccttcacctactttagcaacaccggtgaaacgattatcggtgaaaatacctctgcgtcattcgataaccgcgagggcaacctgtattacccagtggccacttcacccgtagcaggcgcgactccgggcgacgccgcggttaccctcaattggacagctagctcgggtacgctggcgaacattaccggatatcaggtgggggtcgctaccgttccgggtggcccgtacacgtttcaatctgtcggtaatgtactgtccacgattaacaccggcttggcgaatggcacaacgtattactttgttgtcaaagcctatgcaggcaccttatacctggcctctagcagtgaagtgagtgcaacgcctgtcgctgcgggaggtggtgggggcggcgcagggggcggtggtggaggaggtggtggcggtggaggtggctcgtcgagcagtggctcaggtgctgccaccttcagcgggaaagcgtatccaaaatctacagtgacgctgctgaaagatgcccaggtggcggcgaccaccgttgcggggaccgatgccagctttgcaatggacgtggatgagctgagcgggggcaactacgtgttttctctctattccgaagattatcagggacggcgttccagcctggtaagtttcccaacttccgtaaccgccggcgcgacaacgagggttaccgggatcttcatcgcaccgtcggtagcagtggataagagcgaagtaaaaaagggcgacgacattgcgatttttggtcaatccgcctcgaactccaatatacttatcactattaattcagatcaggaattttttgctaacgcgagtacatctgctgatggaacgtacatctattacttcaataccgccccgctagagctgggtgctcataccacgaaatcaaaagcaagccttaactcgcgtatggtttctggctattcgttggcggcttcgtttcaggttggcgacaaaaatgtgttagcagtcgccggcgcgtgcagcaaagctgatgtcaactgtgatggcaaagtgaacttagtggacttcagtattaccgccttctggtataaacgcactctgtctgccgaatttaaaactatagaagctgaacgactgaataacgatggcaaggtggacttagtagatttcagcctgatggcgtactattggactggttaa

SEQ ID NO: 1133 - DNA, 648 bp, Artificial Sequence
  Synthetic Polynucleotide
atgcaccatcatcaccatcatggtggttctggtaaaacttttaagatcgctgccgcagcggcggtaatggccacggcgggcgttgcaatgtatgccgcttctccagtcatggcgcaggggatgggtgcagagcgtggaaaacccatgacctgggctgacgcgaaaggcatgggtgatcgaatgtgggaacggttggatgtgaataaggacggtaaattagatcaagtggaccgtacagcccgcatggaacagcgcttcaaaagtattgataccgatggcaacggcgcaatttcacgcgatgagtttatggctcatcacgcgcaaatgggagaacggaaacatggtggggcccgcatggcgggtggcgacgatgcaatgggggatcacggcaaaggccataagcgtggccgttggggtaaaggaggcatggccggtggtcacatgctggcaatggcggacaccaataaagatggggcggttagccgcgcagaatttgatgccatggcgaaagcgcatttcgacaaagcagacgctaacaaggacgggacggtaacacctgaagagcgtagggcgatgatgaaagatatgatgggtcgcatgcatggcaaacgtggcccggccggccagccggctccggctgcggattaa

SEQ ID NO: 1134 - DNA, 1881 bp, Artificial Sequence
  Synthetic Polynucleotide
atgcaccatcatcaccatcatggtggttctggtgagattggagttgaatcgcagcaacgcgcagtggtcgtacagcatctcttcaaggtgggtgacctgcctttacgagtccaccgtgttgcgaaagaagccgctccgcatcttatcgcgaacccaccccagggccacgcctttcaagctgtgctgaatgatttgccgatagagccgccgcggagtgggattgcaccgcagggtggccctctagcgcagcaagcggctgtaacactgcataaatggaaactgggccgcgcaacggaacccgcctcaggggcggtggaaggtgccggcgagatcctgcgtggaggcgcagaaggtgggagcgttcaacgtccacgcggtcgggctgcgggcgtcgaagcacgccagggtatggcccagggcctggtcttacttctgaacggaactgcgcttgtgggggagggcttgcgtcacccgtttcaacatagacctgaacgcgaacaggccgtggcgggtttagcggggaaaattggtgcgggtaaagaaggcggggttgtggtgcgtcaccagaaacatcgtgagggcccggcagcgggtcccccgggcgaacagctggttggcgctctcgtggatgccgtacaggttcgctctctgttaccagtccacctggatgtcgacgtcgaaccagttcatcaacgacggggattgtgtatcctagaaggcctggtcggtcatcacatggccccggtagccggcggcgtggctgatggcgagcaggaccgccttgcactggcgacccgtcctctgcaacgcctgcgtccgccaggtgtgcctctacacagagttgtgggcgttctgcaacagattggagcagtggccgttggtcaggtcgtattgcgtcatttcgcggcgccgctcggagttccgtgcgaagtggaagcaaccgcagggaagtccacggcccgctgccatggattggatagaggcggccgtcaccggccacagggttgggggagctctttacgcaatcgcaaaaaccaacgtccgcccctgtacctgcggaagaaaatggcgcatattatcggtttatcgttaagccgtggtgtaccgatgaaaatacgaaggtccccgctgtcgctggcgttgcttgccaccgctctgatgagtggtggtgccgatgcggctccatggggtgcacccggctatctcgcgtttgaccgcaatggcgatggccaggtaagcgaagaagagtttcaggcaatgcgggcagagcgtatggcggaacgcgctaggcaagggtatccgatgcatggtgcccgccacgcaccgagtttctcagattttgaccaggatcgcgacggtaacctgacaccggaagagattcgtgatggtatcgcggcccaacggcaaaagatgatgcagcaacgcccgggacgtggcgatcgctgtggctacggtggctgccctcaggccgctgcggcgccggcggaagccgtcgcacccactgcggctcctgaagcagctccagctgcggcgccggaatcaaaagcggcagcgaccgatagccgcggcgcggcaggacgtaaaggcaaggcgcggccgggcttcgccgaatttgatagtaacggagatggcttcatctccccggaagagtttgaccaggtaagggccgcacgccaggccgccagacaggctgcacttgcagaacgtggctatccaatgatgggtcgcatgcctccgtttgcggggccggacttttcggcggggcctgggcctcagggattcccgccgatgatggcacccgccggctggggtcctgcaccaggcggctaccctgcgtatccaacgtacccggcctatcctaattatccggcttactggtaa

SEQ ID NO: 1135 - DNA, 330 bp, Artificial Sequence
  Synthetic Polynucleotide
atgcaccatcatcaccatcatggtggttctggtaagaaaacgttcctgaccgcgttgcttgtatccgcctttgctgcaagtgcgtttgtggtcccggccatggctgaagaggggaaagttcgtgaatggggcgaaaaatatttcgagaaaattgacactaacggagataaatcaatctcgaaggatgaacataccgcgttttctgacagcaaatttagcgaggccgataagaatggcgatggtgtgatatctcacgaagaatttctggaaaagaaacaagagcataaagaaaaattcaaagacatgaaaaacaaagcagatggagaatga

SEQ ID NO: 1136 - DNA, 1326 bp, Artificial Sequence
  Synthetic Polynucleotide
atgcaccatcatcaccatcatggtggttctggtcacgcgaaaagtcagacccaagaaatatatgagcgtctgtgccgagttattccgggcggggtgaatagcccagtacgctcttgtaagaaccttctgccctgccctgtcgtggcagaatcgggattaggcgacatgctctacgatgttgatggtaacggttatatcgacttttgtggctcatggggtgccctgattcatggccatgctcacccggcgatcttggaagccgtcggtaaacggatgcagaaaggcactacgttcgggctgaccacagaaattgaggaacagttggcgcgcaaagtgtgcgagctggttccatccatcgaaaaaattcgttttgtcagcagtggtacggaggcaaccatgtccgcggtacgtctagcacgcggcgctaccaagcgggaattagtggtgaaattcacaggtaattaccatggacacgcagattttttcctcgttaacgccggcagcggagtactccaactgaacgctacttcgtcttcaagcggtattccgcagtccattgttcaacatacggtaagtctaacctataatgacttgtcggcctttagcgcgtttatgcgtgaacacgggcagtcgacggcagccgtcatcttagaaccggtggcggggaacatgggcctggtgccggccacccaggaatttatagcgctgcttcgccaagagacaaaacggtgtggagcactgctgatcttcgatgaggtaatgaatggcttccgtctgggtctacagggtgcccagggcctgtacggggtgaaacctgatttgacctgctttggtaagatcattggcggtggcttccccgctgcggctttcggcgggagtgccgcgattatggaccatttatctccactgggttctgtctatcaagcggggacgctgagcggcaatccgctggcaatggaagcaggactccaggcattgcaaatgctggaaggagaaggcttttacgcggaacttcaggctaaatctgatatgatcaccaaaccagtggaggagttacttcgcaaaagcaacgctaatgcttgtattcaacaggtcggttcaatgttcagtattttctttggcaagaggaaggttagtaacatggacgatgtcaaagaagcagataaagagcagtttgcccattttttccgctatatgctggaaaacggcgtttatatcccgccatctgccgttgaagcgtggtttgtgtcgatggcgcatactcgtgaaaacctggaaaagactcgagatctaatcctcgggtacatagccgaaatggacgtgtaa

SEQ ID NO: 1137 - DNA, 1278 bp, Artificial Sequence
  Synthetic Polynucleotide
atgcaccatcatcaccatcatggtggttctggtcgcaaattcatgctccgatcggcatttcttgtactgattacttttaccttctttcaaggtgtgctggcggacggagaatacacgggccagttcaataagaccttagttcctttgacagaggatctggaacgtgtcgtgctgaaaagcgttacgatgcagcaactgaaaggcaaaatcgccgtacccgaggatgcgcatttggctgccgcgcggcttgcggatccgcgtaccaaaaacttttcaatattaactttgctggtggaagaacagggggaagacccatatttatttatcgacattaacggtgataatgccctgaccgatgatgagaagctcccgctgaaacagagtgaaaaagataacccgtatatttggaatgcatccgcggaaattaaactggcagacggtcctttcaaatctctaccgctgttcgttgagtacctgcgcagcatgaagatggacaaaatgggcccagaagaccgcttactccgccaaagcacggaagtcatggctggcggacgtgtgaacatcaatgggaaagatgttctgtttcagtatacatacgatgcggataaaaagaaagtggacccgctgaacggttggcttggcgtcgataccgatggtgacggcaagatcgacattgatgacctttctgccgagtccacgaaagccaatgaagagactgttgtatttcgggcggcggatgtgtatgtctcgaccaaaaaggctgatatatccaaagaccaaatcaccgttagacagaaccaggccaaagattacaaacgtgccgaactgtggacaggcaaggaatttccccaattttcattcacggacttcgaagggaaaaagcacacgttttcagaatatcgcgggaaatatattctgctggatgtgtggggtttgtggtgcccggcatgtcgtgatgaactcccctaccttaaagaagcgaatcgcaggttccagagccgcggtctagtcgtattaggcctcaacaccgatgaaaactatactgtagacagtatgaaagctgcgttgagtaaagcagggatgacctggacgcatgcacagtttgaaagtattaatgagttcctgcgtacaggcctgagaatccacagctttccgtcaacctttttaatcagcccagagggcaaaattctgtcgatgaaccgagtggatcgtgacgaatcttctcttcgtggacgctctctgttggaaactctggacgaacttttacctgcaatttaa

SEQ ID NO: 1138 - DNA, 972 bp, Artificial Sequence
  Synthetic Polynucleotide
atgcaccatcatcaccatcatggtggttctggtgagactagatttaccgaagacaaatgggtaaaggggtatgaaatacaaccaacagcccgcgatgtcgttcaccatgtgttagtgttcgttcgggctcccgaagaggaacttccgggctcagaagatgagggtatcggaggctactttgcaatttatgtgcctggtaactctcatcaggtcttcccggaaggctttgcgaaacgcattccggcgggcgcccgtctgcgattccagatccactacaccccaagcggtacggcaacgcaggaccaattgcgcattggttttgttttcgcgaaagagcgtccgcgtcatatcgtacgagtggctggactggccaatacccgcattactattcctccggctgcggccgatcatcgtgatgaagcatcgatcacagttccgtgggacgtgatgctcctggggtttgtcccacacttacacgtacgcggcaaagcctgtcgctatgaagcgtttctgcccgatgggacccgtaaggtcttgctggatattccgcgttacgacttcaactggcagctgcggtatgagttagctgaaccattagcgatcccgcgcggttcccgtctggtgtttacggcgtggtttgataatagtgatcaaaacccggcaaatcccaacccaaataaaaccgtccgctggggccctcagaccttcgacgagatgctacttggctacatcgaatatttcacgaacgatgatcgtcccgggactctcggtaaacagcgcggtggcgtgggaagcgtggatgttgaagccgccttccggaggctggactccaatggggacggcaaactgactcgggatgagctgccgccgcgtcaaagggaccgtctgatgaagcttgacacaaaccaggatggggcgatcaccgttgaagaaccgaaccgcctaacaacgctgcggaatccaggtggctaa

SEQ ID NO: 1139 - DNA, 657 bp, Artificial Sequence
  Synthetic Polynucleotide
atgcaccatcatcaccatcatggtggttctggtagcatttccaaaaccctgttactcagtgcaggcgctgtccttgcgttcgccgcgactcccgccatggcacaagaggcgtcagtgacgaccaagacaacgaccgcggtttcgccaacggtagatgggggtgctgtgtacgaaactcattctgtcacaaaaccgaccgacaccgttgccgtgagcggcgaagcacgacgcccggttgttttttattattacgatgtaaaagcaggtcagatcatagccgcgtccaccatgagcgaagagatctttagtatttgggataaggacggaaacggctatatttcgcctcaggaatactataataacgagatggtagtgtatcagccggtcgaaacagaaacgaaagtgttctctgacgtggatgcggatgggcggctggaactgaccttggaagagtacacgatgcgtctggaaaaagtgccgggttatacagacatcaatgcggatgctaaaactggcttaacagcccaagagtttgtgggcgcagggtttcaggaaaccgatgacgacgataacaaccaggtttcttacggtgagctggtagaagctttctatggtcaaccacgtatggcgtcggaacaggaacgctataataattaa

SEQ ID NO: 1140 - DNA, 2616 bp, Artificial Sequence
  Synthetic Polynucleotide
atgcaccatcatcaccatcatggtggttctggttctatgcgtcactccgtattgagccggaacacgcgcgttagtatgggagcggtgtcggccctcgtcatgcttgctggcagcgcacatgcggcagattggttatcaccggactcgaccccaactcgacccgtggcctttggtcagcgcgcgatgataacaccgctggatgccgcgaagcaacgtgctgagcagtatattgaactgcaaaccttcatgagtctgcctctggacgcgcagcagcgcatcattgatgcgggggcagccccggatctataccaggccaatgactttgatgaaagaattgttgctcaacatggtgagacgccgtatgaagcggttgcaagcgtggtaagccgtgaaaccttcgataaaatgcgcccgatgcacaggcatatgctgaaacgtgtcctggaatcatctcaggagcgcggcccatttggccacctctgcttcacccccggtacgccttccgacgtggtccaagcctttgaagatgcgatctttgggaacatcccgcatggagacagattccagttgactggccgttggaccacgagtgcattaggcgagccatcattcaatcaaggtgatccggtacggcttacatactcgtttgtgccagatggtaccttcgtgccggacctgattggcgtttcaggtaactcccagctgtttgcgttcttaaacggtatctatggcaccccggccgtgtggcaagcaatctatgctagcatgtgggatcgatgggcgtcgatttcgggactggaatacattctggaacctaatgacgacggggtcgctctgaatgataaccccggcgtaccgggggttcgcggtgatttgcgcatggctgcgatccccattgatgggggcggtggcacgctcgcctacaataactttccgaacgatggtgatatggttttagacgcattcgattctttttataacgacacttctaataatagcatacgtttgtttaatatcctggctcacgaacatgggcacggccagggcctcctgcatgtctgtccacgtgaggagaacaaactgatggaaccgttcattagcgttgcctttaacggtcctcagtttgatgatcagttagcatcccaacgccactatggggacaattttgaaccgaacgataacgccctctcggcgagtgacctaggagcttttaccggcagtacaatcactcagaatctgctctctattgatgacgattccgatactgactactattcgttcacagtggcctcctccaccgcggtagcggtgacggtacgagctgcgaaccgcgcaccttaccttcagggaccccagaatagcggctgcaccgggggtacgctgttcgatccgagaatcattcatgatcttaaggtagatattttggcatcagacggagtcaccgttctggactccgtggatgcagcgccagcgggagaaaatgaaacggcggtggcggcattaggcagcgccggtacctactttgttcgtgttcgtggcagcggcgccaacaatatccagcgttatgctcttgatatcgaaaacgcgccgagtattattcgcctagcatctaccgttgatgaatttattctgccgggcacgtcgctggatgtaacagccgacgctttttcatctgccgccgacccaatcgtgcccgggagcgttaccctgaactaccgcttcgataacggtgccttccagcagatcgtcatgtcccctagcggaggtaatgtgtttattgcgtcaattccgagcgtcagttgtgatgacaccccgcaattctttttctcagcaagtacttcgggtggcgccaccttactggatcctccgcagggagcgggtgctccgttttcttttggcgtgggcgagctggtcgtgtctgtagacgacgatttcgaaacagacttaggctggacggtgtccggcaacgctacagacggccagtggactcgtggcgtcccagtcaatgacgacagaggtgatccgccaagcgattttgacggtagcggacaatcttgggtgaccgataacgccccgggtaacagtgatgttgatggcggcagcactatattaacttcaccggtgttcgacgcaagtgagggagggacgatgtcctatgcgtattgggttaattcgggtcctggcgatttgatcgatgactcactagccgttcaagtggcgaccgacgcggaagggacgaattggacgaccgttaggaattatacaaccgaatccgatgattggcgtacagacagcgtgtccattggggtgggcggcgagattgaacccacgtcgactttacgggtacgctttatcgcgaccgatggtgggaccgctagcctgatagaggcaggagtggacgcgttccgcatagatagtctatcatgcgtcgatgtggtcgcatgtgatggtgatacgaacggagataacgtggtgaacttcacagatctgaataccgtgcttgcggcgtttggccagaccggtatgggacttgccggtgacgtgaacaatgatggcgtggttaactttaacgatctgaatgaggttctggcgaacttcggcgcatcatgcaactga

SEQ ID NO: 1141 - DNA, 861 bp, Artificial Sequence
  Synthetic Polynucleotide
atgcaccatcatcaccatcatggtggttctggtacacgtccagttcaggcagcttaccgaatccggggtatagcgtccgcccccggggaaaaagagggaaagatgattcatcgcctgattgcggctggccttatggcctcagtagcagcggctgccctagcagtccaaacgcctgcgccggtggcgccgccgactgccccagcgccgcctatggctgctaaagatatgaccaggggtgaagtgcaggccatggttcgtgagcacttcggcaaactggacaagaatcgcgatggggcaatcgcgaaagacgaattggattttggcccgatggcgctccgcggcggtgccgatggtccaggggaacgtcgcatcggcattcgtcgcggagagggtggagatcatggtgacatggccatgcacggcggcccggaacatggggatgtaatgtttgaacatcacggtggcccggcacgggacccggcaaaagcgttcgatcgcctggataccaacaaagatgggtcgatttctcgtgaagagtttgcgaaaggccgcgaaatgcgtatcgagcgtcgtattgttcgaggcggtcccgaaggcgccgatcgcggtcctgtgaagcgtatgcaatggcgcgaacatgcaggcaaaccagggggagtcaggggtgcccgaatgatagtgatgagcgacgccgataaagacggtcacatcacgctggcggaagctgaagccatggcattgaaacatttcgatcagatggacgcgaacaaggacggtcgcgtaaccgcggaggaacggcgttctggcagaccgatgatgtttcgcatgcgccgtcaggaacacgcacccaaaggctcatga

SEQ ID NO: 1142 - DNA, 1065 bp, Artificial Sequence
  Synthetic Polynucleotide
atgcaccatcatcaccatcatggtggttctggtaaaacacctaatccagggcgcattagtccgggactctatctgcttttaggtatcctggtttccgcgtgcgcaccccgggaagctaccgtcggcctgttgctctacaacgagtcagatccgtatataatggaatttgcccgacaaatcatggacgaagcgggcacgtcgctggagattactaagttagatgccggtaactctcagttgattcagaatgaacaaatcggccgcctgcttgatgcaaaaccggacttactaatgattaacccggtggatcgtttgggtgcgtacgctattatcagacgcctgcaagcggaagatgtaccagtcatattctttaatcgtgagccgttggccaacgacctgagcatttgggatcagacctattatgtgggggcgaaagccgaacagagcggccagatgcaggcatcactggttatggatctgttcggtggcgatccagacgctctgaatctgtacgaccgtaacaaagatggaatcatccagacgattgtgctcaagggagaacaagggcaccaggacgccgaaatccgtacccgcgaggtcctccggtcttttgaaagcatgggcctgcccgttgaggtgttggcgcttgaggttgcaaattggaaccgtgatgaagcttacgaaaaaatgggccgcctcttgggtagtttctcgtcccaagtagagctggtggttagcaacaatgatgccatggcgctgggggcaatttcccgtatgcgccaagccgacatgtttaaagatactaatggcaacggtaggctggaccgcgaagacgagagttggattccggtcgtgggtatcgatgggctacgtgaagccgaagaatcgatccatgacggctatctttatggaaccgtaaaaaatgattcactctctatggcgaaagcaatggtcgagctgacagcggctctgctgagcggtcgagatcctgaatcgttagcatatccgctggtcgcaggtaaatacatatggattgactaccagccgtttgtatctcaggactga

SEQ ID NO: 1143 - DNA, 1053 bp, Artificial Sequence
  Synthetic Polynucleotide
atgcaccatcatcaccatcatggtggttctggtccgcgacaaagtcctcttgccgtggcggtcctggctgcaaccgcggcggccagcgctcagtctgggccaattactctcgatctggactccccgtcattggatcggtggaattaccccttcaacccgacgcccggtgtacgtggaacagccaccatatttggtgcaacgggcttagatggctttgacgatcgcgatgcgcagttcatcgttggctttgacaccggagatgcaattccgactgggatgggtctgggcttctatcgcctggtgagcgcgcgtttgaccctggttgtccaaaacgatttagcatttacctatgacccaacgccggaccctcttgaatcgttcctcctcccggacgatccagattttgtgcctgacgctaccccgggccgcccgatcgaggtatacgccactgcgtataggaatggtttcacaattgggaactgggaagaaacgacgccgtttggtgatgtaccaatcattccaccggcagagggcgcgcgtaatgccttcgccgccttttatccactggccggcgaaccggtggatctgagtcgccaggttcgtttgggcctggaatccaccccgtttgcaatcggtcaggcggccgatgtgcctgtcggtgagctagttccagcagaaacagtgttcacctttgatctggacccgtgtgcgcctggactggcggcgttcctggacgtctctctggatgcaggacgcttaaacttgacggttacttcgatgcattttgctgagttgggtagcgccgaatttcccggcttttttaccaaggaaaacccgctgagtcccattcttgggtactccccgcgtctggaactgacggtgatcgccgtagatgatgctgacgtcaatggcgatggtagcctcgacctgttcgatttcttggcttttcaaaatgcgttcgcggctgggggcgcgattgctgattttgatggagattgctcactaacgctgtttgactttctcgcgttccagaacgcgttcggcggcggctag

SEQ ID NO: 1144 - DNA, 660 bp, Artificial Sequence
  Synthetic Polynucleotide
atgcaccatcatcaccatcatggtggttctggtgcgcaccggcccccgtttgctgcactccctcgtcgaggtttcttagcgggggccggcgccgcgctggcattgggcgccgctccgcttccagtgagggcgcagctgtttttcgatccggtcctacgcgttctccccagcattttggtacgtcaaggtcgtagttatcgtccgctgctggagtctgtgggagaagtccgcccagtaacatcgcgcactggcgacctggcaatgccggatacgtccatacctgtttttgaatttccggagaacctggctgtgttccgcgactacgatctggatcattcacggttcatcagcaagcatgaagcgatgttagcctggcttaccctgatggccggtattcgtactgggcagcgcctgggccccggagacttgagacaacgcgttgcgccggatgggcctgatgttccattgcactatgtggaattgccacgtacggaccgccgtcagatctggctactgctgaaagaaaccccggagggtgcccgcttaattcgcgatatggaaacctttctttccatgcagatcgctttaggccggggtccggtgtggctaaatggctaccgtcagggtgggatggaaagtggcaaccgtcggggacattga

SEQ ID NO: 1145 - DNA, 2013 bp, Artificial Sequence
  Synthetic Polynucleotide
atgcaccatcatcaccatcatggtggttctggtcatgggtgtttgcgtcctaacaccacggagccaaatagtcgggaatttggcgcgttcccccttacaaggattgaatggaaccgtcgacaaatagccgtgtcccgcgtctctccgctgtatggatcgggtctgatgccgaatagcaacgctttatttcaccgtcgccgcctgctggtacgccgttcaggtagcctcgcactgttcgttgtgctgatcctaattttaatcgcgggcggcggcggtttagtttggtactattttcagcaggatcgttcggagactgtcgaacgcgtcttgacgacctccgtgacccgggggccgttcgaacaaattgttctggaacagggtgtggtggaatcaagctctaatgtagacatcaaatgcgaggttaagagtggcgcctctagcactaccgaaattatttgggtgatcgatgagggaacgcaggtaaaaaagggtgacaaactcgtcgaactcaaaacatccgcgctggaacgagatctggtccagcaacaaattgtttgcaacaccagctatgcattagtagtacaggctgagaacacgcttcgtgcggccgaaatcgcacgcttggagtacctggaaggttcgtttcgtcaggaagaacaaactatcttgagcgaaatatttgtggcggaggagaatctgcgcagggctcagttagccttccaatcaaccgaacgactagcagctcgcggcattgtgagtgcccttcagctcgaaggagatcagttcgcggttgaaaaagcacgcaatgaactggaagcgggccaaaccaaactggaggtaatgcgcaaatatacaaaagctaaaatgctgaagcagtttgacagcgatattgccaccgcgcaagcacgttgggactctgagaaagagtcccataagcttgaaatggaaaaacttgaggaaatcaaacagcagatcgccaaatgtactataattgcgcctgaagcgggccaagtggtctacgctaacacgttttctgggttcgggggtaatagtgaaattgtggttgaacagggggccctggtccgtgaaaaccaggttctcatcagattgccggatccgactaaaatgcaggtaaaggcgacggttaatgaaagccgtatttcactgatcagagcggaaatgccagtgagtatcgagtttgatgccattcgtggccgtaaattacagggtcgtgtcacccgcgtgaaccaatatgcggaacccacgtcgtggcgctctggcaacatcaaggaatacgccgcctatgtcgagatttttgacccgccggtcgaagtgaggtcaggaatgaatgcagaagtacgcattttcgtggagcggcaggacagcgcactccaagtgccagtccaggcagtatacgaaaccaaagggcggtttttctgcctgttgaaggatggtgaacgctgggaaactcgtgaagtgcaggttggctcgtctaacgatagttttatgacaatcaaaagcggcctgagcgagggcgagaatgtggtactgaacccgcgcgcttatgcggaacgactggagctgccttacatccctgacccggtcgctccggaacgtagcccggaacaggcgggtccccagggcgagctagccgatgttggcggttctggcccaggaggtccaggacgcggtggagggcggggtgccgctgggggcgattccgccccagacggtgaacgttcgggcggtcgcggacctgctggtggtggctccgcagctggtggtccgggtggaggcttcgatccgaaccgcctgtttgccatgttggactcagatggcgacggcacaattagtgcggaagaactggcgaaaatcccagaagaacaacgtgcacgcatggcagcgaatgatttagatggagatggggccgtttcccgcgaggagtttgctaaagcaattgcggcgcgaggcagtgggaaccccggtagccgttcggaaggcaatggatcctga

SEQ ID NO: 1146 - DNA, 615 bp, Artificial Sequence
  Synthetic Polynucleotide
atgcaccatcatcaccatcatggtggttctggtaaacgcaatacactccttgccgctatgacgttaactgcaaccgtgctgggaggcgcggccttcgcggaaagtcaccatggtcatggcgggaagagcggtccaggcgcggcacaaggtggcgctcccgggatgatgggaatgatggagggtatggatggcatgatggacatgatgcagcggatgcacggtaacatgatgggcgggggcatgatgggtgtcatgggaccgatgggcggcggtatgaccaaaatgttggatgctgatggggacgggaaagtaacgcctgaagaaatgcgaacccagctgcaagcgaagctggcggagtatgatggcgacggggatggttcattatccatcgcagaatttgaaacactgcattcggccatgattagggagatgatggttgatcgctttcagcatctggatgccgacggtgacggtgcggtgactgcggaagaaatggtggccccggcggagatgatggaaagaatgcagatgatgcgttctaacatggcccagagccaaggccaaccgggaaatggtcaggggatgggagatggcaccatgatgaacgataattag

SEQ ID NO: 1147 - DNA, 345 bp, Artificial Sequence
  Synthetic Polynucleotide
atgcaccatcatcaccatcatggtggttctggtcatacccccacgcggcacatcgtgttgggtcttgccgctcctctggtcctggcagcgtgcgcggcaccacatacagatgaaattccggagactcgtgttaaacgccagatgataggactcctggaaaagtttgaccgatgggattatgacgggaacggcaaattaaccgccaatgagctgggcgaagcgacgaaactatcgggtgtaccggctaccgatattatcaaattctacgatactgatggcgacggtggcattaccctccgtgaagcccaagcgggatatggtcgcccggtgcagcaggcacgttga

SEQ ID NO: 1148 - DNA, 933 bp, Artificial Sequence
  Synthetic Polynucleotide
atgcaccatcatcaccatcatggtggttctggtttggtccaacttcgccatcgacctactgacgttattttaccatttgtgcagttcggtgcagtagtgctggcgctgtcggccggggaaggcccgggtgctgtcacaggactgggcgttctcctggcgacgggcctcatcgggtggaagagggcgctacggcacgcccgtctgatagctgatacccccaccagtcgtattgcatcagccgcccagggctacaccgagcttcgcggtcgcggacaaccgttggatgggatgccgctgcgttcccctatcaatggtctgccggtgctgtggtatcgcgttttgattgaacagcgacagcgtgatggcaaatggaaacgcgaaactgtagacgagagcgatgcttcttttctactggaagacgcgagcggtcagtgtgtggtcgatccagagggggcagacatgatggtgaaacgttgcgatgtagtgagacgtggcgatatgcgctatacgcaatggtcattaatccgtcatgaccgcatttacgtcctgggcgatttcgcgaccttgggttcggttaacacagattttgactttagcgcgcaagtacgtgaactgttagcatcctggaaagccgatcacccgggccttctggctcgcttcgatcttgatggaaacggtgaaattgacgtacgtgaatgggaactggcacgcagtcaggcgcggcgtgaggtccgcaggttacatgaggaagttatggccgcgcccgaagtgcatgtgatgagacgtccgacgggtcgccgactgtatctcatctctgatcacgatcccgcgcggatagctcgccgatatcgtgctctcgcaatctttcacgccgccgttgttattgccgcggctgcggcaaccgcatggttcgcgcagatcggcgtgttctag

SEQ ID NO: 1149 - DNA, 384 bp, Artificial Sequence
  Synthetic Polynucleotide
atgcaccatcatcaccatcatggtggttctggtcctgttcgtcgcgtcgctgcgtgtcttgcatttgccttggccccgacggtggcgagcgcacccttcgcggcgactccggctgactacctggccagaatggatgccgatggggatggtcgagtatccctcgcagagtatcaggcgtggatgacacgtggctttagggctatggaccggaatggcgatggaatactgcaagacggtgaactgccaccggggatgatcttacgtccgtcacagccccgcaccctggatgcgttcttagccaacctggcgcgtgcatttgcacgcctcgaccgtgatggcgatggtcatttggacgccgcggaactggctgccccgccacgctga

SEQ ID NO: 1150 - DNA, 675 bp, Artificial Sequence
  Synthetic Polynucleotide
atgcaccatcatcaccatcatggtggttctggtccgcagcgtacagaaataatcatgcggaacttaaaaacgagtttggccgctgcgaccgcactggcgctctctcttgccgcatgcggaaatgagcccgacaacgctgataccctggatacggacactgcgatgaccgattcgaccctggccgactccactgtaaatagcgatgaatttaacccactcgaacgcgattacacactgacggcggaggcacgagaacgtcgcgccgaatttgatatggacgagttcaataacgaatttcgcgagattcatgatggtctagcgcaaagcggctcagcgaccgcaactggcggtaccacgaccacaacatctcctgggactacgaccaccacgaccggccagactggttcgggcagcgggatgaccgacaggagcgctatgaactggagttatctggatcgtaattccgacggtcgtctttcggtcgccgaatatgccatctgggctattccgatggatccgaatgcgccaaagccgaacgatgaaaccaaaccgtacacgaccgccgaccaggctaaccgcgccgcagattcattcttctattacgatacggacggcgattattacttgtcccaaattgaatttaataatgcgagacggggtggggatgtttcgtaa

SEQ ID NO: 1151 - DNA, 585 bp, Artificial Sequence
  Synthetic Polynucleotide
atgcaccatcatcaccatcatggtggttctggttgggcttcggtgtccccaaagacacagcgtaaaaaatctgccgactcagatgcagatagttctgatgaacgaaatgacgcgattatcgaggatgttttcagcaaatacagcaaaaacgggtatatgagccgctttcaatttgcgctcgtcgtatccaagctttcgaaacacgtgaaagaattaaagggtgtcgagagtgaaactgttgccgccgcattcaacttgttttcgacgggcggacaggtaatgaccctgggcgaatttaaaaaatggtggggtgaatccgacaaattcagctattttgtgggcaagagatcacgcatgatttccaaagcgtacgctctgtataaaaaatacagttcaatagagacgctgaataccagtactgaaaacttcaaggcgcgtcggatgaccctgaaagagttcctgaagttacttggtgatttgaaaatcgaagttgaaaatgatggagacgaatttgatcagattgaccaagacggtgatggcgcgctcagcttcaaagagttttgcgcttggctgaaatggttttga

SEQ ID NO: 1152 - DNA, 2013 bp, Artificial Sequence
  Synthetic Polynucleotide
atgcaccatcatcaccatcatggtggttctggtacagggtgctcacccccgcctccgccactgttgcttgtcgaacagcgagcttcgctgccggatggagcccaagagcagctgccgaggctcgcgcaacagtgtggtttagacctgttcacggtacgtcagcgtttgactggccgcggcctagcatgcctggcggaagccccgcgggaacgcttagagccaattgtgcctctgcttgaaaccctcggtctgcgtggttggatcgttcaaccgaccccgccacgctttgcaccacagcgcgtgcgtagcgtcgaactggcgggagattccctaagatttgccacggcaggcgagcccctggctgcgggccatgaagatcgggtattggccgttttggcggacctctctggtaccttagtgcagagaaacctgaaaaagctggcggtgcagactacttacctgggggctggaaccccgttagatccagaggaaatttatcaatccgttctgcgtggccgcccgctattagacttgtatcgcctggatgacagtggtgcaataggtcaaggcgtccgcctgttcccgggcaggtttgatcctaatggtttaggcgaacacaaaagcctgagtgctgccgggaacctcgacgcaatcctgcgcttgttacgggagcgcgtgggggaacttttccttcatagcgattttggcctggtcgaactgcccggttgtcgtccacagccgctggcggatgggcaggcgccggaccaatcgcacctcgccccagtgacacgttttggttggctgctcgcggattggcatgcagttcgcggcagaaccccggcgcccgtaacgcccgaacggctagctgcggcggctcttctgggcattccggccgctgttgtggccggcggtggctctccgcctggattggaggaactggccgcggaactgcgtaccgatggcgctccaccgccggaaaaagcccctcccggccgtacgctgccgcctcctccggagctgaaaccgttgcaccgcccgtggctctcccgtcgcacgctccagatcgtgttcggagtagttgcgggtagtctggccgcaattggtggtggaggcgaacttgtgaaaaccgcgctgcattacggcctgaagacgggagcagtccctgccctgttcgcgctcctttttgggggctggggcctgagctcactgcgtttgaaacgtcacatggagaatttaccaaccagcaaagcgcgctcagttgcaatgggcctcgtggaagtccatggtagagcacggcgtcagtatgcactggtgtcaccaatgactcatcaggcgtgcgtattctacaggttacgtcgctttcgccgtgacggggatgatcgcgcctggcaagaatattcgaccaccgattgcggaccggtcccgttcgagctagaggacgatacaggtcgtttaacgattgatcccgcaggcgcacgcatcgaacctaggcatcggcaggaaggctttccgggagaaggctcgttgttttttacgggtgggggttctacagacgcgaccgaaaagtgggttgaagaaattatcccggacggtgctgccatctacgtaagcgggttcgcacgttccgcggatcgagctaccccttcacttgcggagcgcacgcgccagagtctgcgtgaactgaaacaagatccgcagcgtatgcgccgatttgatcgcgatggtgatggacgagtagatggggacgagtggcaacaggcgcgcgaaacagtcgaacaggaggtcctagaacgtagcctggaagaacggttagaagcagcaccaccagccactcgtgtggtaattggtcacccgagacagagactattgccgtttgtaatagccgagacgccaagcgagctgcacctgacacgtcgccagggcctgctttccggtggacttctaggccttggttttgttttagctgtggtggcgttgatccaactgcttcgcttcttcgcggtgagtggctag

SEQ ID NO: 1153 - DNA, 420 bp, Artificial Sequence
  Synthetic Polynucleotide
atgcaccatcatcaccatcatggtggttctggtttacgccttgctggcttgacagcggcctttatcagtctcggagcaaccgcggtcgcaacggggctgcgtgactacgatggtgatggcaggatttctcgggccgaatttgcggacgccgtgggtcgtatagctcgcgcggcggatgttaacaaggacggggtaattgatccggatgagttcgtgtggactccagattgcctgcgcctgttcgacaatgacggtgatggccgaatcacctcggtgggcattcatgaatttcgtgacggtatgatccttgccttcgatgcactagatctggacggagatggctatctgtcccctgcggaagcaagcgacgcacgccgctatggtgttcacattgctagcaacgatattaaatccagttga

SEQ ID NO: 1154 - DNA, 747 bp, Artificial Sequence
  Synthetic Polynucleotide
atgcaccatcatcaccatcatggtggttctggtcctggtacaccaatcattgcacccctgagtggaataacgtgtacttggtactcatataaagtcgaggaaaagaccgacgcggctggcgatcagcgcgaacggtggcgaaccttgcgcaacgaaacgtcggatgaccttttcttactcaaagatgacaccggggagtgcgtaatcgatccggaaggtgccgaggttatgccgtctattagcgaagtgtggtttggcgataccccgtcctggaatggccaactgctgcgtagaagctctggtcgctatcgttacacggaacgtcggatgcatccgggggacgcgctgtacgctattggccagtttcgctcaatcggcgggagccaggagttacctaacactcacgaagaagtgcgagaactgcttgccgagtggaaacgtgatcaagttgcactccatgcccgcttcgatcgtgataatgacggtgtgctatcgctggatgaatgggaagcggtccgcaaagccgcatggaaagaggtaattgcggcgcaggctaggcgcgcgcgtggtccggtccaccatttgctgacacgtccagacgatagtcgccgtccctttatcctatccgtgctcccacaagaactgctgattaggcgctatcggaactatgcaggcctgagcttgttggtatttctgttggcaggttcggctgcgacctggatgctgacggcccgtttcgccggctga

SEQ ID NO: 1155 - DNA, 492 bp, Artificial Sequence
  Synthetic Polynucleotide
atgcaccatcatcaccatcatggtggttctggtaatgctatcaagctagcgtcagccttaacagcagcggttgtactgtcgaacccactgttggcccttagcgcggatgaccatggggctcgtgtcgaaacgcgattcaaagcggcagataaagacaacgatggaagtctgactcgggaggaagcaaaagccatgccccgcgtggcgaaaaattttgatgctatagacaccgataagtccggcaccgttacgcgcgtggagattcaggccagcatgaaaagaatggcaaaagaaacccacaaacgtggtgaagagcgttttaaggcggcagacactgataacgacggctctctcacgcgcgaagaagcgaaagtaatgccgaacgtggccaaaaatttcgatgctattgatgccgacaaatccggtgcagtcaccggcaaggaaatccataactacatgaaagcgcaccgccaacagagtaaaaaatcctaa

SEQ ID NO: 1156 - DNA, 1326 bp, Artificial Sequence
  Synthetic Polynucleotide
atgcaccatcatcaccatcatggtggttctggtggacatcgttctcgcgctccttcaccgcgactgaggggtgaaggcgcccgccgtgcgatgggggattgcagtgaggcaccaatcgcggtgcgtacccgccggtgggccattggcggtttatcgttgttccgtggccttgcaggaggtatagttatcgcgccgattggtcccggctgtgaatccaaagaacgcctcgtcgggcgcattacactgagcctggccctgttgggcatggcaagcttagcgcaggctcaaacggtacaggtgctgggtgacctcaccagtgggggcgccatcgctggtgattttccggcggacctggtcggcggagaggattcgcctatgacctgggatttttacacggttgaagtagaagcaggccaactggtgcgtattgaggtggaccgtactaccgattctctggatccagtttccgttgcgtatttcggtgacgtgcagggtcagccgctgccgccagaagggacatttgtattcgatgctgacttgtttctaccgatggtctttgtagcgagcggcgatgatgacgatccgagcgccactggtttcggaccctttggagatccgaactatacctttacggcggacgcgactggcatatacaccattatcgtggcctccttcatcagtgatcctggcgagctgggttatacggttgaagccacgattggtgacgcccccactcttcgcctagaacgacttggcgatacgacatttggtgatcggtttaatcgtccgagctcactgacctcactcagcggaaccgcaaccgatgtcgccttcgaggcgattgaaatcgaggtggtagaagatggcttgttcaccgtcctgggcgaccagactaactttggcttcctgtgggacgggtacttactggtgtatgaaggtgggttcgatccgttttctccgctcgacggtcttatcgccttgaatgatgattactcgggtgctctgctgccagggactggcgttggctattcgggcattgaaaacttaaccttgcgctcaggcgtcccttatgtgatcgtgacaacgggcttcgcaaatgacgacgcgggtccatatcaactgcaagtactcggtacttccgatgtccgaatctttacctgctttgcagatattgacggcgacggtcagttgacgatttttgattttctcgagtttcagaacctgtttgcggcgggggatctgagagctgactgtgatgaagacggagagttaacgttattcgattttctttgctttcagaacgcattcgcagctggatgcgaatga

SEQ ID NO: 1157 - DNA, 2493 bp, Artificial Sequence
  Synthetic Polynucleotide
atgcaccatcatcaccatcatggtggttctggtatccgcgcggtactgttggctggtcttattgcctcacccagcgcagtcctggcctcgagtccacctacattatctgcggccaggtttgtgccgggggatgcaagcatagcggctgcgccgggcgttcagcacaagtccgccatctctaaaggcggtgaccaatacctcgtggtttgggaagatcgtgcgagcaccatttccaacattgcatgggagcagactgaaagtgacatcgtgggaattagactggatgcatcgggccaaccgatcgatgctacgccgttcacgatcagtcggaatctaggttatcagcgccgccctgaggtcgtttggaccggagaatcctgggtggtagcatgggaaaaccagagcccgaccgcgggctattacgaatcacgtattaccgcggctcgtgtcagctccgacggtgaggttattggcgcaccgtttgaaccattccctactaatgggggcaacgattttcatatggccagtaacggttcaacggtcgtgttcgtgactcagtcacataatgctggcgaaggagggctgctggcccgccaaatgaatccagatggttcgtttgttggtggcaccgtgatactggccccagaaacttattttctctatttcttcgtggacgtgcagtctgcgggtggcgagtacctattaacctacaacgcggatacaggtcccgtagtccggcgttttagcagcacgctggagccgatcgggggaccggtcagcattccgggccgtcgatttatcgcatctaatgggtcgcagtatttgctggttttcgaagggggtcaatttggtaacaccttacttgcttctcctatgaatgttgacggatctctggtggtaccgggcggcacaccccttcacgatcaatttaacggtgccattctgagcgtagatgcggcttactctgagggtgtttggtggctggcctataaagaagcgtggaatggactctcctatcagcgcatgaccgacgctggggcacttttagacccggccttgctggtgtacccgggcgtctcgagagattgggtggaagccccaaaagttgcgccggcgacgggcggcggcgtagtgacagtgtgggatgattcacgcagtatcaacggcgtctggccgagcgaaatttataccggaaaggtcagttcgcctctgtccttcactgagcccgacgttttgtccctggctgccccgagtcagatgagtccagaaatagcggccggccctgggcattacttattgacgtttgcctcgcagacaagcgctggtgttcgtatcatggcgcagcgtatcgcatcgaacggcgcggcgattgatgaagagccaattgaagtagccgcagttaataccgtcggtggctcaccggccgtcgcatggaacggcgcaagctatctagtggtgtggagtgatggcctgaatattatggcacgcaggttgtccgaaaccttggacttactgggtgacggaccgctcacgttaatgccagggtcaactcctgacgtgagcgcgttgggagaaaacttcctggtagcgaccacgtcgttcgccacctatccacaattccgcgatacctgggtgcgtagagtatccggtgaaggcgccctgatggatgccgggcgtatctacgtgggtggtggatatgcgcagttttctcgcgtggaaacgtttgatgatcgttggctggtctgctggcaaaacaactggactcacgacagtccgaacagtgatctggtggctcgctttgtcggcgctgacggcgtcccgggtgcgagcataggcgtagcgtcgacaagcggcgcttcaggacatccggatattgccgttggcccggactacgccctgttcgtatggcgccaaaataccctggcaaatgctaataatgacgtaatgtgtcgacgtatccgccccgatgggacatctccggacgcaggtaacgttatggtatcgaacgcgccaggccgccagctttttcccgttgcgacctggactggcgatgaatatttcatggcttgggacgatcgtcgcaacgctgatacgttttttgatgctcgcgacgacgtttacggttccagaatatctagtgccggcgcggtggtcgatccggcgggtgtagcaattttcagcgatgaccggccggagattactccggcgatcgccagcatggggaatggccggtttctagtcgctgcatcagtctttcgtgatgaagtgggtctgcaaggctatcgtattgcggttcgcgcaggaggtccccagtgcccagcggatctcgatggggacggtgagatcggattcggcgatctaaacctgattctgaccaattttgggttaggtacaccgggggcagagacggtgattggtgatgttaacggtgacggtgtggtgaatttcaccgatcttagtgaggccttgtccgcctacggaggtggatgttaa

SEQ ID NO: 1158 - DNA, 1653 bp, Artificial Sequence
  Synthetic Polynucleotide
atgcaccatcatcaccatcatggtggttctggtcccgttcaggacgagtatcttatcgatgtagatgccggaaagggtgtcgcagtgggcgacctctttagcatagtgaaaccaggcgaaaaagttattcacccggtgacaaaagaagtcttggggaacctggatgaggtgaagggtatcctgcaagttacccgcgtaaaaacgggttacagttatgctcggcctgtccgtgaagcgaaaggcattgtccgaggggatgcggtgcgccgtttcgaaaatgttgccgcggcattttgggatcaggaaggcaccggcgaagacctgttcaaagagctgaaggccgctctaccgcagttagagtggcaaggttactataggggtgcggggcagactttgcctgctgatactccgccgctggtatttgcactccgcgcgggtaaactggaagtgttaggcccaggcggacgtgccctgttcgtatacccggtggccgcgtcacaaccggaaacggcacgtccggctgcgcctattgcgtctgccccgtcggctatcgttcccgcgccaatcccgaccacctccgcagccgcccccgccgcgaaagcaattgtgccggcgccggccacggcaagcggcagcgcgattcttaagtcccagggtgctaacgcggagggactatggatgagtcccgaaatcaaaggtgaactggttggcttggcggttgcagatattaatggagacggtcgcctggaaaccgccatagcgtttccgcatcgcctcgaaatcgtacgaatttcggccgggcgttatgagacagttacctctctggacctcggatttggccaaaaagtcgtttcacttgatagcgctgatctggaccgcaacggcgtggcggaattgtatttaactgctgcggacaaagatgtgctgaaaagcctggtagtgacgatgaagaacggtaaactgaccattactaataaaaatttaccgtggtacttccgtaccgtcaaattgccaggggaaaaggagctgctcctggcccagatccttggccgccttgaccgggattttgacggccctttcctgcgtctggagatgaaaggcgataaactcgtcgctggggaaccatttgtcgttcccaacggcctggaattgttcggtttcggcgcatttacgacaccaaatggagagcagttgtttgcccagatcaacttcctggacaatctcaaagtggttaagcctaacggtgaaaccatttggagttctgaagaacgctttggtggtggtgaggcgttcattgagcgcaaggatccggatcgatctccggctgaagggcccacgtcgagaaatgcatatatgcaaaaacgtctggaacttggggcatcaggcgagctgttggtcccggtaaacgaagggagccgcctgttaaaaggcgcgcgttccttcgaccggtcgcatatccgtggaatggtatggtctgggtttagcctccaggaacagtggagaacgcaaccacaggaagcttatttagcggattacagactggcggatgctgataatgatggtaagctggaattaatacaagcactggtgttttcgcgtgacggctttggctcaaaagcccgctcggcgctggccattttcgagctaccgtaa

SEQ ID NO: 1159 - DNA, 396 bp, Artificial Sequence
  Synthetic Polynucleotide
atgcaccatcatcaccatcatggtggttctggtgcaatgccaaaaacacaacagaaggcggccaaagaacttttagcgctctttgatatcaatggggacggcacggtgtcagaggaagatttggaaaaactggagaagatactggaactggaggctaaacgggcccaggaacaagaccgtgatcgaaaagaagatgcgcagcgcaacatgtcgtggttcgcactgtttggaatgctgttatacccggtagctgtcatgctctctgacttcctaaacctggatggtgcagccaatattttgggtactatggcgcccacctattttgttgccgtggcggcgattgttgccgcattttatggcaaagaggcatacctgtcccgtaacaaagacgaatag

SEQ ID NO: 1160 - DNA, 606 bp, Artificial Sequence
  Synthetic Polynucleotide
atgcaccatcatcaccatcatggtggttctggtaaaaatctatcacggactgtgaagatcggcttcgtaatgctcgggagccttggaattataacctctgcattattggcccaggacctgccggatcgcggtcccgttccttttgcgacatatgatgctaacggtgacggctacgtctcgaaaaaagagttttatgatgtgcgagacgcgcgtaaggcccaaaaagaagcacaggggtacccaatgaaaaacgcggcaaatgccccggatttctccgctctggataaagataaggacggtaaattgaccgaactggagctgcttcgcggccaaaacgaacagatgcagaaaaataagggcaacaaacaaatgcagccgcagcagagccgtatgccggcctttgaatctttcgatacgaacaaagacggtatgctgtcaaaacaagaattgacggagagtcgtgacaagcgcatggaacaaaaagcggcagatggtaaaatgctgaaaaatagcgcgaacagaatgccttttgaagatattgatgctaacggagacggccagatctcgaaagaagaatttctgaatcaccaaaatcgtcgcaggtaa

SEQ ID NO: 1161 - DNA, 453 bp, Artificial Sequence
  Synthetic Polynucleotide
atgcaccatcatcaccatcatggtggttctggtgctacgatctcgaccaaggagcgggaaaaacatatggcggaaggaggggacatatacaatgaaaactatttctttcgtgattatgtttctgaggatatttgcgcatacggtattggcccattttggctgtatcacttcaaagaaactttgatcggcattcgcgataaccaggaaagaaaagcgtggtttgccgacattaatacagtcaaagatgcccgctcatcctttgtgcccaccatggaccaactcacggaggaacatatcaaggaagcaattcaggagatcgataccaacggtgaaacccttgagtatgtaaatatcgacgatttacaaccgatggctaaagaaatgatgataaaagaagccatgcgtgaagtggatgcgcgcgcgacgggcactcctcgaaacctgaacagctaa

SEQ ID NO: 1162 - DNA, 678 bp, Artificial Sequence
  Synthetic Polynucleotide
atgcaccatcatcaccatcatggtggttctggtcctgcccaacagccggaaaagtggattcgtcttgaggaatctgatggttaccccaacttctttacggtgttgccggacggaagactacgagaggcttttttaccagataatgcagacctcgcgtcagcgccggccgaagattggcagaccacagattatgaatcctgcggcaccgttctgccacgctcgcacgtcctgctgcatggggagccggtggctctgttacaagtagtgagtaacgttcagtcagtctgtcagactgatcgccaagcgtgcgtaaatcagctgttcgcaggcatcgacgttagcggtgatggcaacctcagtacggcggaaatagcccgtctgtttagggtggctggctatgtcgccgcggtgagcgaagacacccctgccggtaatgacgaattggcgggtgttctggctgcggggctgccgctgggacccttaatggcaagcgcaatcattaactcgtttgattacgacgataatggcgtcgtgtcgctgtctgaattatcccaagatcgcgggactcttattgaccagctggagccggagacgggtgatgaacttaacagccgtctgaatcagatgaaagaagcacttaaaccactgggtcggatcttggagaacttcggacagtaa

SEQ ID NO: 1163 - DNA, 564 bp, Artificial Sequence
  Synthetic Polynucleotide
atgcaccatcatcaccatcatggtggttctggttggggtgtaagccgccatgatcacaccatccttgagggggacataacaatgaaaacttcgaatctcaccccggccttagcggcagctttcctgttgggaggcattggcctggcgcaagcagaatcaggtcccggcaagatgggacaggggatgtggatgcagcatagttttgaagagctggatgccgacgcggatggccggattacgcaagaagaaatggccgcgcacatgcaggctaggtttgagggcgcagatgcagacggtgatggtgcgttgtcccgcgatgaactggttacgcgtatgaccgaacgtcaggccgaacgaatcgccgcttatgcggatcatatgattgagcgccatgactctgacggagatggtaaacttagcccagatgaaatgaaagcggatcgtcaaggcagaatgttcaagcgggccgacgctgatggggacggcgcaatcacagaagcggagtttgataaaatgcgcgaagacatgaaaagccgccaccagggtatgaaagctaaacaataa

SEQ ID NO: 1164 - DNA, 858 bp, Artificial Sequence
  Synthetic Polynucleotide
atgcaccatcatcaccatcatggtggttctggtaaagccactcttgaggggattttcgctggcgtcgcagcgctgctcatctgtacgggtgcgtcaccggccgctgatctgcacccaatagtggaagttgaaagtggatacttatttggcgcgattagcgacggcaagtggatcaaagcagatgaaacagctaaactaatcggtgacgaaaccacctatcaggtatatggtttgacacaagcgctcggcgaggccaaagccggaaagcccacgcgtccggaaggtctgccgtgcgaggaaaccctggcggtgtccctgtcgcctaaaccagaaaatggggttattgcaattgccgccgcgtggaacgcacttccgcgcaaacccaaggtgatagatcctacccagaaagcatacgtcgatgttgtgcgagactttttagagactaaagaaattaaacaaccgaaagtaaagatcgattctatcttgcgcgtcgatctggacggcgatggtgaagaggaagttctgatcagcgcggcgaactatttcgggaaagcagaccgggtgccgatgcgttcaccggctggttcttacagcatggtgttactgcgcagggtcgttgcaggcaaagtcgaaactcagttggtagaaggcgagtttcatccaaaagcgtatgtgtcgaaagaaagctccttcgacgcgccatccatttataaggtaattgctacgctggatctcgatggggacggaaagctggaagtggtggttggcagtaattactatgagggtgaggaaattaccatatacagatgcgatccgaaaaaagtggaaacccttctaagtgttgcctgtggagcatga

SEQ ID NO: 1165 - DNA, 939 bp, Artificial Sequence
  Synthetic Polynucleotide
atgcaccatcatcaccatcatggtggttctggtttacgcacgggatggccagcgggtctgcaacacgatactgtgaacttcgtacttagcgggggcaatttgctcatcctgctgctcggttttcgaattggcacaccgctgggttggtcactgtcttttgccctggtcggcttaaccagtttctgggcatggtacgctaacctaaagcgttatcgtaccgttgcggacacgcccacctcgcgcatagcctccgcacctcagggctatgtcgaaatcgttggtcggggaaaacagccgccgggggagaaacttgtgtccccggtgagcggcctgccgtgcttgtggtttcgttacaggattgaacgccgtaatggtgatcgctgggaacatgtagagtcaggtgtcagccatgatacttttggagttgacgatgggtcgggcatgctgcttgtggatccagaaggcgcggagattcgaacgagtcgtaaacaagtctctacccagggtggctatcgccgcacagaatggaccttgatcgaaggcgagacactgtacgccattggggaacacgtgaccctgggaggtccctctgccgtactcgacaaacgcgcggacttggctaagctgctggcagaatggaaaacggataaacaggcgctgttagcacgattcgatcgggatcgtgatggcgagatcagcctcgaagaatgggaagctgcgcgtaaagcggcaagtgacgaagtggacagagctcatttagacattcgcctcgccgacgggattcacctgttacgtaagcctgcacatggtcgaccgtttctgatcgccaaccgtgaagttgcagcgctggtaagacacttccgtctatggagctgggctcacctagcgattatggcaggcgccgtgtcgggtctgatgcttttgccccgcttggcgtga

SEQ ID NO: 1166 - DNA, 1329 bp, Artificial Sequence
  Synthetic Polynucleotide
atgcaccatcatcaccatcatggtggttctggtgaggcggcaaccagaacacaggtcagtccttaccacttggcctctcgctcgcggctcgaaattgggaaaacgaagtccggaactgataccggcacgtatcaagacccatataaaaccttagatcttacgggcctgtacaattattacaacataggtgctacccagggtacttatcccatccgtaacggcctagaatacgcgaaatatggtccgggtcgcaaaccggaacaaactgataccgacaatctgtatctgattcattggaacaatccgtggcgaagcatcgtgggcggagcgatttttatcgggaactcatatattaataggaaccagcataccttgtacctgcaaaagttcgacctggatgatacctatgatggcgccttttggcaccagtatatgggcaatttagacgcaccgcgttacgagggtaacgaaacatacaaagcatatctggaaatgggacagatggaaaacaatttcgagtttattatcccagtaatccctggtattccggaaaaacccgttgcgaagccgacggatgctcgtagcaggaatcattggctgaaaacaatgaccgtggagggcatcaccctttctccagccttcgacccggcgaaaaccgaatacacgacaacagttaacaacgatgaaaccaaagcaaccattacggccgcccctgtaaattccaaagctaagatttcgggcactggtacctacaacctcgcggagggcaataacataattaaactgacggtgaccgcagaaagcggggaaaaacgtgtctacactatctcaattacccgcaaggctgcggatggtacggttccgcctgatgtcatcactccgcaggatcccatcccggcgcttacatttgaccaacagattctgaaagtgagtggtgaaaccgttacaggcgtggacccggctaaatcgctaaaccaagtagaactctttacggcctctttagggatccctgccggctatcaagtccaggttttggatgcagcgggaaagccacagcagaatctggtaggtactgggaatatagtgcagattagctatgagaatttattgacgcagcgttatacagtgattgtatatggggacaccgatggcgacggtcgcattacctcggcggatctgaaccgtaccttcaaccacgttttgcaaaaaagtaccctgaatggtgcctttgcgagcgctgccgatgcagacaaagatggcaaggtcacgtccgccgatttaaatcgcatcttcaaccatgtgctgcaaaaagcagccctggcgcagtga

SEQ ID NO: 1167 - DNA, 1668 bp, Artificial Sequence
  Synthetic Polynucleotide
atgcaccatcatcaccatcatggtggttctggtaacaaggaacaatttgtaatcagccggttcaaaaagattctgcgcgagtcgcttcaggaaaaagctgacagtctcatgacgaaactgaattacgatgaagagacagaattgtatcctgagaacgaatttgattatgttgaagaggaaatgaatgaaggtgagacttgcgaacagtgtggcggggaaataaaagaaggagagacgtgcgaacaatgtggcggtaaaggcgaagtgatggaactgggtggcatggaggattcacaccccaaatttggggacaaaaacctaagcaagttaaccaaaaaacagatggaagacttactgtatggtatggaagatgaagaagatgaagattacaagccgcgtaaacgaaataaacgcgatgacgacgaagagttcgattttgagctggatctctccgaggaagagctggacgaaaaattgtatggaaaacagcataagctggacaggaacaagaatggccgcattgataaagaagatttcaaaatgttacgtaaacaacaggacgagactgagcagctctacgaagtggagttcgaccgtgaaattgaagaggaagaaaccgtcgaaggaaacgcctttaccggtgcgcttgcaaaagcgaaagaagaaggtaagaataccttcgaggttgatgggaaaaagtaccaagtgaacgaaaaatgggaaggcgatgtagaggttgaacagacgggcgaatattctggtatgagtatcgaagagttgaatagcgccatctcgaaactgaaaaaacaaaacgataaatttaaagaggatggcaaaaaagtcccgcagaagaatcgcacgaaaatgtcacagctgtatttcgcaaaacgtgcgaaacaggggtggaagggtaaaggcaaagccaaagtgaaggaatcgattttgtacaccgaatccgacctgatcgatttaatagaaaacattgtggtagaggaaactaaatttaacaaatccgaaccaaagggttatagagaatacgagagagcgcataaggcagataaaaaagaaaatgacgattacctgaaatctgtcgctaaaaagatgacagattatctgaaaggaatgagcgacgacggcagcaagtatgagatgaaagaaaccaaaaaatttccgaccgaaaacgggggaatgaaaaaaggcaatcgtaaaaaatatacgccgagtgatgctgtggatgaatacgttgatgcgttttcatatcctgggcaaaccaaccttgtttacgacgaaatcaaaccaaatgatgaatggattgaagatttactgaaaggttcctctcgcaccggcaacgcacaggtggacaaagacgggaacgccctcggtaacgtcgtacccagtaagactggcgagaaattctataacaattttaaagataacctttatggccaggagcaacaaaaagctagctacaagcgccagacccaaccggtcgatcaggcgggcgaacacactgaaaaaggcagcctgaagtcgaaacgtggtaagaagacagcgcagagtatcctcaacaagctggacgaatctgttgaaacgaaaaaagatattaaattgaatgaggaatttgatcgaatacagtctcttatggggtataatcgtaaaacacagtaa

SEQ ID NO: 1168 - DNA, 636 bp, Artificial Sequence
  Synthetic Polynucleotide
atgcaccatcatcaccatcatggtggttctggttctccccctcaagcgcgggccgggatccgccgttccttcgcatcacatcgcgtaagtaaggaacgtcacacaatgaatacgaaaaagactattatggctgcgagcgccgctgtgttggcgatgggtaccatggcatatgccgcgccgggcatgatgagggctgagggcccaataacccttgaagaagcccaggcaaaatcggccgagatgtttgaacgaatggacgttaacgatgatggacagctcgataaagccgaccgggaagcgcatcgcgcgaaacgctttagcatgttagatacggacggtaatggctcgatctctaaagaggaatttgcagcaatgcacgaaatgcgtggcaaacatggtgatcgtgaacatggaaagcgtgggcaccgcggtggtatgcatatgatggcgaaaatggcggataccgacaacgacggagtcattaccagagcagagttcgatgccggcgtggccgcccacttcgcgaaagttgatacagacggcgatgggactattacggatgcagaacgtaaggcagctcatgataaaatgcgcgagcgctttaaacaagcgcgagaagccagggcggcgaactga

SEQ ID NO: 1169 - DNA, 990 bp, Artificial Sequence
  Synthetic Polynucleotide
atgcaccatcatcaccatcatggtggttctggtcaagagtttttctgtgctccttgcattgccgcgatgcccgcagcgaagttttggctcgtgtttggtgccgcaagtgtattagcactgggggcgctgcatttggcccgcaaacagatcataaaagctcgtcttatcgaagatatgccgaccagcagaattaggtctgcctcacagggctacgttgaactgatcggcctggcgactggacggggccagcttctgacagcgccactctcggctcgtccgtgcctgtggtggcgatatacgattgagcgctatcaaaaatccggtaaatccagcagctggcagaccctggacaaaggtgtctctcgtgaaccgttctacatggatgatgggtcaggtgtttgtcgcattgaacccgaaggagcagaggtgtcgtgcctgcaccgcaagcgttggcatggcgcgacgcgtttaccggacacggcctcacttcaattgaaaccgggcttgctgggaggtctgagccctttgctaagtcggggccgatatcgctacaccgaatttcttattcgtgatggcgacccactgtatttgctcgggcacttcgtcagcgatgcgagtggtcgccgcgtgctaactttagaccagatcggcggccaactgatacgtgaatggaagcgcgatttcaaacagttactggtacgttttgattcggatgggaacggtgtgctcgacgattctgaatggcggcaggttcagaatgcggctcgcgctgagacacataaccatcaacgtcagggtacctcccgtgaagttgagcacgcagtctcaaaacctgaagcctctgatctaccgtacctgatcggttcgcacgggcaggaacaattaagccgccgttttcggtggcaagcactggcaggcgccgcggggtttctgggagcgggtgctctggccacctggctgattacgtcacgcttgggcggctattattga

SEQ ID NO: 1170 - DNA, 330 bp, Artificial Sequence
  Synthetic Polynucleotide
atgcaccatcatcaccatcatggtggttctggtatacgtgtgacgctcatctctgccgcggctttagcaggggcgatgggagccagcgcgggtgagaaggtaacttttgcagatgttgacaccaatgccgatggcatgatttcagctacagaatttaccgcgcataaaacggcagacggtaaacacaccgaagccgaagcggcagccaaattcgagactattgcgggcatggatggtcagatctccgaagaagactgggatgcagctatggaggaataccgggataaaaaagatgacaagagtgaaaaaaccgacggcacatcgtggtaa

SEQ ID NO: 1171 - DNA, 951 bp, Artificial Sequence
  Synthetic Polynucleotide
atgcaccatcatcaccatcatggtggttctggtattgatgtgcatggagttatgtggttgagccctgcacactattacctttttaccggtctggctactttcgcggccctagcgtgtctgtattttatgctcacgcggctgcaacgcgcccgatgggtcgaggacacccccacatcgaggatccgctctgcggcccaggggttagtagaattgaatggcctcctggatgcaggcggtcatgaaccgctgctgttaccactggctaagcgtccgtgcttatggtacagattccgcgtggaagagcacaaaggcaactcagatcgggacagtcagtggcgtacggttgaacaaggtgtgtccgaacgtccgtttctgctgcgtgatgcgaccggggcctgttggataaacccaatcggcgcagaagtacatccgaaacatcgccgccgttgggagggcaatcagcgttggccggctgataaaagcgtcgcgaaaggtttcttaggaggtctgcttcgcaaacgctatcgatacactgaagagtggtttgtggcacaggaacccctttatgcgattgggtggtttgagagtagaggcggcggtcgcgacgccgttgatatgaacgacctctcacgtcaagtcatttcgaattggaaggccgactatcctaacttattggcgaggttcgatcggaacggcgacgggaaaatcgatctggaagagtgggaacgtgtacgccgtgctgccaatcaggccgcggaacaagaggcacgcaccgcgggccaggcaccggtggtgcatgcgctgcggaaacctccacgtcgtggtctgccgtttgtactaagcgatcaccacgaagaagaactttctagccggttgcgcggaaaatcgcgttgggccctgattggcttggctgtttccgggacgctcgcgtgctggctgtggctcgcttga

SEQ ID NO: 1172 - DNA, 984 bp, Artificial Sequence
  Synthetic Polynucleotide
atgcaccatcatcaccatcatggtggttctggtcaggagtttctctgcgccgaatgtatcgcagctatgcccttggcgaaattcgcagtcgcggccgtggctgcgctggcggccagcgggtttggtctgtaccaatgcggacgttccttcatgacgtcacgctttataggcgacatgcctacctcgaggattcggtctgcaagccagggctatgttgaattagtaggtcttgcggctgataagggcgcccaccaatccgccccactgactgggcgcccgtgtctttggtggagatatacaatcgaacgttacgagagttcgggtaaatcacatagctggaaaaccattgaaaaaggtcacagtcaggctccgttctatctggatgatggcacgggcctgtgccgcattgaaccgaacggagcagagatctcttgtttgcatcgaaaggtgtggcgcggcagtcagcgtcatcccgtgaccgcgacggttaaaaaatctaccgggctcctagctggatttcgtcacttaagcctggcgaataactaccgctatactgaatacttaattcgtgtcggtgacccgctgtatgtactgggccatttcgaaagcgattccaccggccagcggctgctaaccgtcgatcaagttgcaggtcaagtgatccgcgagtggaaacaggactttgacaagctgttgatccgtttcgatgataatggtaacggcgcacttgacccttcggaatgggcgcgcgtgcagcagactgcccgcgatgaagcacgacagcgtcagaaaacgttgtcaccagagacaagggaccacagtattagactgccggaagaaaaagggctcccttttattattggctcgcatggccaagaacaattaatacgtaaatatagctggcgcgctgcgggttttggctcactgttcctagccgctggcgcggtatctacctggctcctgagctcgcgtttccttggttaa

SEQ ID NO: 1173 - DNA, 2112 bp, Artificial Sequence
  Synthetic Polynucleotide
atgcaccatcatcaccatcatggtggttctggtcgagcatcatctatgcgtcgccgctcctcggtaactagcggtcgggttctcagtctgatcgctggggccttttggggcatagcgggattcctttttggcagcggcttgaccacagtcgccgcggctcccaacgaacctgtgaggcaaggtccggtgccactgaagccgggtgaccgtggggttggtcagttagtggcggcaacctccttcacggatctggagggccgtcagcatgccattggggatacggaaggatttaccgtcttcgcagcgaccggcacatcatgcccgctgagcttgcgctatgttccgactcttgtcgacctggtagccagtgcaccagcgggctttcgttttgtgctggtgaatcccaccgcctcggatgatccggaagctatgcgccgtgatgcggcacgggttggcggtgtctctgtgtacgtacacgacaccgatggtacgttatcggaggctttaggactcctaacaacgacagacgtagtcattgtggatgctagccgcaccgtccgttatcatggggcggttgacgatcaatacggcttcggttatgccctggacgcgccgcgccagacgtttctgcgagatgccatccgcgcgctggccagtggccgtgaacctaccattgcagcgaccgacgcgccggggtgtgaattggcgttatcctcaccagtggagcaggccgtcgcggctacttaccacggtgaagtttctcggctgctgcaacgccattgcgtggagtgtcaccgtgatggaggtgtaggcccgttcgcccttgatacttatgacgacgttgtggcacatgcagggatgattcgggaagttgtgggccgcggcgtgatgcctccatggtttgccgcagatgaaagtcccccggccaacgatgtttctgtacacgcggcgcatcagttgcgttgggctaatgatagatcactggcagcgagcgaacgccaagcgcttctggcctggctagatggtggcacgccggctggtgatcctgccgacgcaccgcagccgcgcagctacccggagggttggctcatcggcgaaccagataccacttgggaatttgcggaagctgtacccgtcaaagcaactggcgtgatgccgtatcagaacatcgtcgttgagactgggctgaccgaagaccgttgggtacgtgccattgaggtcagacccggtagtccagccgtggtgcatcacgtcctggttcatgtgcttcgcccgggagacgatggcgtggcgcatgatgaacgcgaaggattctgggccttatatgttccagggcagtcagtcctgacgtaccccgaaggctttgcaaaaaagctgccagcgggagcacgtttgaacttccaaatgcactacaccccgaatggcacagccaccgcggaccgaacgcgaattggcgttgtattttgcgatgagcctgaacatgaagtgcgtacaaccggtatcgtgaacacacacatttccatcccgccaggcgcggccaatcaccaagagcaggcgagcatccgcttgccgtatgatgctaccgtgatcggttttcttccacatatgcatgtacgggggaaagcttgtcgttatgagctgacccgcgcaggcggcgagacgaccacgctactagatgtcccgcattacgatttcaattggcagctgctgtatcgtctggctcggccgttgccgttaagcgctggtgatcgcctgaccttcacggcatggtttgataactcgcaggataacccggccaatcctgaccccacggcgaccattggctggggcccgcagacgtttgacgaaatgcatctcggttatgttgaatactacttaccagaagtccctccgggtgaacaaactgcggaacgtggttggtggggccggttcgtgagcaacctggaacgcgttgatctggatgcggcatttacgcgactagatacaaatggtgacggaactctgaccccagacgagttaccggagcgtctgcgcgaccgcctcatgcgcctggaccttgatcgtgacgggtccatttcgagacaggaagcagcacgtcttcgtcgtcgctaa

SEQ ID NO: 1174 - DNA, 2217 bp, Artificial Sequence
  Synthetic Polynucleotide
atgcaccatcatcaccatcatggtggttctggtttgtctaaaaacacccgaacgcgggctctcttagcactagccgcgggccttgcgattgggagtgcagcccacggacaggctgagtgtcgcgcggacctggatggtgatggcgcgctgactctgttcgactttctggaatttcaaaatcttttcgccagcggtgatgttcgtgccgattttgatggcgacgggtccctgaccttattcgactttttggaatttcagaacgatttcgcacaaggttgcccgacaggagaggtaatcgcactggaattagcgtcacgctcgctggaaagctatccttttgctgattacgtccgcacgtttgatgtgggtgagactataaccgtggcgatcgatccaagtgttgctaccccgcccgtaggcatggtcgacgtgtatgttgtggcctctaagacggccgaccagtgggcgcttgatgcaagcctcgttgatgctaggggcttgccgcagccgctggcgttcgggtcaggttcctcgacggccgacgtccgtgtagccctggcgggcaccggtctgcttaatgcagatgcgggcgaatcaattggggtggcgtacgatgtcgtgattgacaccaacggaaatggcgaactggatgcaggcgacttgattgatggtctggatggtgtaggtttctggctctttaaaaacctgacagcgctgggcccggttgcttttaccagagtggaaacatttaccgcaacgttcccaggcatccccagcactcgaaatcaacagcgtcttacttatccttccgacatcgccactcggagcgatgtgccggttgtcgtgattagtcatggtaacggacaagactaccgctggtatgattacatgcatgatcacttcgcatcccatggttgggtcgtgatgtcgcaccagaatgacaccgtgccggggattgagacggcgtcgacgaccaccctcgcccataccgatttcttttatggcaacttagccactatcgcgggcggagttctgaacggtcgtttagataaagggcgcacggtttggattggtcatagtcgtggcggcgaaggtgtcgctcgcgcgtatgaccgcatagttactgggtcttactcacctgtaaattacgcgttgagcgatatcctggtggtcagctcaattagtccgacggactttggtacccgtgcgcgaccaggaggggttatctatcacctgatatatggcagctctgacggcgacgtgcgtggctcggtagccagcggttcgaaaccttttgcgatttatgaacggggcacaggtgataaacaggtcacatatctgcaaggcgcagatcataacgatttcaattgctgtggcttcaacgatttcgtcgggccagtaggtaccgagatcggtcgtgagcaggcccagcgcgttgctctagtggattggctcgctctgattcaacattacgttcgcgggaatgaaccggcccgtgacgttctcgaacgccagtgggaatcgttagcgtttccgggcattgcattttctacagtggattccgagttccgcccagcccgaggaggggacgatttcgttgtagatgattttcagacccagacgagtaccaccgtagcgtcgagtggagctaccgtggtcgccactgtgtctaacgcgttcgaagggctgatgcaagatggtgacagctcctatacctggacgggcgcagacgctatgaatggaatgagtcgtgtgcgtccgggttcaatcgatgatactagaggtgtcacctttagctggaatggcagtgatgcggcatatgcatacacactactgcctgccgaccgcgacgtatctgccttcgctggcctttcctttcgtgcttgccaaatcagccgcgcgcctgaaactacagaagcgctaggtgacttgacgttcactttgacgctggttgatggctcaggcgtgagatccaccattaacattggagcatacggcggaggcatcgaggaaccgtatcagcgtaccggggatggcggcggcgcgggatggtctaacgaatttgaaacgatcactattaatctgacggattttctgcgcgatggttcgggcttagacctgacgaacatcgagcaagtgagatttgaatttggcccaggttttgggagcccacagggccgtattggcttggacgatgtggagttccgcgcgcgttag

SEQ ID NO: 1175 - DNA, 495 bp, Artificial Sequence
  Synthetic Polynucleotide
atgcaccatcatcaccatcatggtggttctggtaccggttctatgctcaagagcaatgggcgctgtgcagcgcttatagttctgttagccttggctggcaactcggtggcggcggcccccgcagccacggctactccggtaggcaaagcagcgcaggcggtccgggagacagatgaacaagccttcgcgaggattgacaaaaacgcggatcgcatgatcagtctggacgaatttaaagcagaactgcaagcccgacgtcagcgcctggcagtgcagcgcttgcgtcgacagtttcaaaccatggattcagatagatccggtggactggacactgttgagttcagccagttacgtctagtgaagaatgcgggctcgaaagctccagcgtttgtagctgtcgatagtaaccatgacaaaaaactggatttcgccgaatacgtcgcactcgtttcacgctatgccccggcacagcctgccgctggtcgtcaaccatag

SEQ ID NO: 1176 - DNA, 969 bp, Artificial Sequence
  Synthetic Polynucleotide
atgcaccatcatcaccatcatggtggttctggtgaagagtttttctgccgtgcttgtttggcacagatgcctgcggccaaatttgcgcttgggttatcagtggcggtaatcgccgcaatggccggactgctcctgagcctgaggaacattcgccgagcgcgcctgattgaagatatgccgacatctcacatacggagtgcttcgcaaggttatgttgaattaatgggcctagcgagcgcaggcgagacgccaatgctgcgcgccccgctcactgaccggccctgcttgtggtggcgttacaccatcgaaaagcaggaaaaatccggtaaatctacccgttggcgcgtcattgaaaaggggcaaagcccggagccattccagctggatgatggcactggtctgtgtcgtatcgaaccggcgggcgctgaaattcgctgccagcatcgtcaaagatggcatggctccgagcgccgtccgggtgcagcttcgcgccccattaccgcgcgcgtgttgggttttgggggccggttccgttatacggagtttctgatccgtgacggtgatcctttatacatcctgggtcactttgtttccgacgccaccggccagcgagtaatgagtgtggatcagattgccggccgccttatccgtcaatggaaacaggatttccgcgccctcctggctcgttatgatgaagacagggacggaaatctcgatccgcaggaatggcgtaaagtcacggaagcagcgcgcactgctgcggtgaaagtgcaacaacatcagaccaacaccgaccaggaacactcgatccgaagaccagatgatggacgcttaccatacctgattggaagccaggggcaagagcagttgtcgcgtcattatcgctggcgtgcgctcgcaacagccgttctgtttctagccgcaggcgccctggcgacgtggatgataggcgcccggttcccgggttaa

SEQ ID NO: 1177 - DNA, 723 bp, Artificial Sequence
  Synthetic Polynucleotide
atgcaccatcatcaccatcatggtggttctggtataaatgaggtgcgagatactgtaatgtttatccttaacaaagacaacaatgggtatttaacaccgtctgaatttaacgctttctcccggctgagccaattggaagtcttcgaggatctgtaccagaaggttaataactggtattcaaaaagaaataaccgcacctcgaatagtggaattgcagacatcgcgaaacatgtgaccgaagatctggaagcctttgttaagacgggtgcgctcacgctggacaccggcagcactttcaccttaccaacagatacgtactctctggtcgatgtgatttatagcaacaaatcagtagaaaaagtttcgaaccacaaaattaccatcctgaacaattccagcctcaccgccccttcgatttactatccggcgtatgtggatcgcgagactaaagttacgctctaccccgacacaattaccagcggcgtgagtgcaatctatgtcaagttgccggaagatcccaattggacatattacaccgacctttccggtaacccggtttttgatattaataatgccgactatcaggattttgaactgccaaaagagtacgaaaaagaactggttctacgtatccttgcgaaggcaggggtgacgttaagggaagctgatataattaacgtagtaaatgcagaggaggcgaaaaacgaacagaaagataaatga

SEQ ID NO: 1178 - DNA, 1605 bp, Artificial Sequence
  Synthetic Polynucleotide
atgcaccatcatcaccatcatggtggttctggtacaccatcgagccaggggacgcaaaatcgtttctgtcgcgtagccctcatcttgggagctttatttatacttactgttattcctgtcaccggtcatggcaaaaccaggattcccgatacgggccagacccaatgcttttctgacactggcattctgtcagcgtgcccggatgcaaacgcgcgatacttcggtcaggatgcccagtttcaagggccggcaatggcgtatagagacaacggcgatggtaccgtgacagatctggttactggtctgatgtggagtcgggctgtggacgcccgtaaggtgtccctggatgatgcacaggcgatggcgcgcaatttagccttgggcggtcacaacgactggcgcgtcccgaatatcaaagagctgtattccctaattaacttttcgggaagcacgatgggtcaaggccatcagggtggcgcgaatacagctatcccatacattaacactgactatttcaatttcaaatatggagacacccgagccggggaacgctacatcgatgctcagtggctgagctcgaccgcatatgtatcatacacgatggatcgtaacccgaccctatttggcgttaattttgccgacggccgcattaagggctatggttacgccgggcgtgggcctcgtggcgaaaagaaattttacgtgcgcttcgtgcggggtaacccgtatggtgcgaacgatttccacgacaatggtaacggtaccgtgacggatcgcgcaacaggccttatgtggagccaagcggatagtcagacgcccatgacctgggccgaagcgctggcatatgcgaacgcgtctcgcctgggaggctaccgtgattggcgcctgccgaatgcgaaagagttacagtatatcgtcgattacacgcgttctcctgatactaccgatagtgcagctatcgatccggtgtttagcgccacccaagtcaccaatgaagctgggcagaaagactttggacattattggacctcaactactcacatggacggtccccgtccggatagcgcagttaccgtatgttttggccgagcaatgggtcaaatgcggggtcgtgttatggacgtccatggcgctggagcccagcgctctgatccaaaaacgggttcaaactccatcggccgtggtcctcagggcgatgcgcggcacgggcgcaactacgttcgtctcgtacggggaggcgaagccgagttgaccctgcaaccggcaccgcaggaccgttcggcctacccgttcgtggtcaaaattgatcccgggtatgaagcgataggcagcggtaatcagacaatgggaccagggcgcagtggcggccagatgggatcaggtcctatgggcagcaatcagatgggtgggggtcaaacgggcggtccgcgcttcgtagaaagacttgaccgtgatggcgacggcaaagtgagctctgacgaatttgatggccctccgcagcattttaaacgcttcgatcgaaacagagacggctttatctctgcggatgaggctcccgctggcccgccaccagggaacggtcccccgcgcatgaacgataactag

SEQ ID NO: 1179 - DNA, 783 bp, Artificial Sequence
  Synthetic Polynucleotide
atgcaccatcatcaccatcatggtggttctggttcccaaacgcatgcgactgaggctgccttgcccccggtgcgtggtacccggcagcgccaggaaccgcgtccaaaacacggaaaggggtgtgatatgaaacgcgcaacatcgactcgaaccattgcgctccttgccacgttaggtaccgcgaccgcactgctgggctctgctgcgctggcccatggccctggcccgggtagtggaggcatgggcatggggtcaggtatgatgcagggttctggcatgatgcgtgacggtggtatgatgcaaggcatgggaatggggagcggcatgatgccacgcttcgaagatatggatgccgactccaatggggcagtcagcagagaagagctgcaagcgtggcgcgcagctcgttttgccgcgatggatgcagacggcaacgggaaactcacgcgtgatgaaatagttgcgtttcaccaggcccaggcggcggaacgcttcggcgccatggcggaccgcatgatcggccatcaggatgccgatggtgatggcgcaattggagctacagagtttggtcgtgtggatcggatgggtatgatgttcgaccgcatcgaccgtgatggcgatggtaacgtaggcaccgatgaaattgaagcgatgcgtgaaaggcattcggcccgacggggcagtcgcggtggtgatgacgggcactggcagggacatcggggataccacggtcaaggtgggtggaatcgtagcgaccgagatgacgatcgcgacgataactaa

SEQ ID NO: 1180 - DNA, 513 bp, Artificial Sequence
  Synthetic Polynucleotide
atgcaccatcatcaccatcatggtggttctggtttcgataagactaaatcagggcgtatagacgtttatggtttttctgctttgtggaaatttatccagcaatggaaaaacttattccagcaatacgatcgcgactgctccggcagcatttcgtatacggagcttcagcagggcgaaagcctggcaggaacacggtgtgcgggcaccgccgatctgagtctctacagcctgggtcaaagtcgcggtgcgctgtgcttactgaccacctcctgtcctacggccctacagaatgcggcactctcgaccggggcgctgcccactccgtctgtgacatggctggactctgaaccaaacccgggccagggtcacgaacagggttggattttgacgatgaagtttctgggccaaaccgatccggctgggcgagagccgtggggatggaaattgtcatccccgggccattgcaaagccggtatgtgtgcactgtgcggcagctttcttttgagcttctag

SEQ ID NO: 1181 - DNA, 1410 bp, Artificial Sequence
  Synthetic Polynucleotide
atgcaccatcatcaccatcatggtggttctggtactaaaggcgcagatgacgaacactttaccctttgtcgtatgtcatgcggtgatccagggaaccattaccggataattgacggacgaaatcgtccgccccgcttcagcatcggccgcacgcgtcgcttagcgatcagtaggctcttgcgcccggattttcgcagacctacagataccggtgccgtagctgcggtgcgtcattcgcagggccgtgtctggcaacgtcagccgaccgggctggagcgcacggccattgaaatgactccacggaacgaaatgaataccccggttcaccctccgccgtccgagaagaggggtacaaccgtgcgccagctgacgcaaaaaacgctgctacctctggttcccatcctgagcctccttctgggcttatctacggcgtgggccatggaatccgcagattgcttggaatgtcataccgacgcggacagtgtaggggctgagttcactattaactcgggccactttgatacaaccgctcatgccgaaatgggttgcaccggatgtcatgagtcggtgaccgatgcgcacccagacgatggtctgactccgagccgcgcatcttgcaaagattgccacgacgacatttatcaggaatattctatgagcgtccatggcccgaatgcgacctgtgccgattgtcataacccccatgaagctaagtcagcaacgcgcgtggccggcttcgacatgaatcgacagtgctcctcatgtcacgatactgacgatacggtcgcgagccataaacaatggctgccgcaagcgagtttgcacattgaagcactgccgtgcatcacatgccataccggctcagaaaactacgttataaccatgtatttaattaaacgggatgaaaataaccgctattctaactttgaggtagccacccgtgaggatctggcgaaatttgctggtgaccaacctttacagacacttgttgataccgataataacgggcttatcagcctgagcgaactccgtgcattcaacggcaatcccgcatacaaaggaatgcgtttgtggggtatgatgacaccagagacgctgacgcactcatatcagatcttggataaccgttgggactgttccttttgccacgcttcgggtccggaagcgatgcagacatcgtacgtcgcattcccggagtccgatggaagctatgtgcggctggcggtagaaaaaggcgccgtgcttgatgctctcaatggcaccccagacttctacatgatgggtgcaactagaaacaaatggctgaatattgcggggctgatgatcattgcgggcggtatggtgatgccggtcggtcatgggaccctgcgttttttgacccgcaagaaccgtgaaggtaaggggcattag

SEQ ID NO: 1182 - DNA, 339 bp, Artificial Sequence
  Synthetic Polynucleotide
atgcaccatcatcaccatcatggtggttctggtcagatcataccggagcgtaccttaactgccccccaagctattcgcgcattccggatgcagtcgcaacaggacgcggcgcgactccaggctgcacgcggaggcgaagtttttgccgcgcgtctgcaagcggtgcagcatcgcccagcttccatggccgggcctggtacgccgacgggcaacacattggcggcactgcttcaacgtctggataccgatcaggacggtaggattaccccgctggaacttcgtgcagctacagatcgccaggccccaccggcggcggccccgcacgaacctggcagataa

SEQ ID NO: 1183 - DNA, 840 bp, Artificial Sequence
  Synthetic Polynucleotide
atgcaccatcatcaccatcatggtggttctggtctgatggcaattaactcgaaaaagtctcagcgggggataaatctcatcgaattgatgatcggcattgccatttcacttatcattttaacaggtgtcctgagcctaatgctgcgtgtaaacgtgtccggcggagagattgttcaatcgacgaggctgaatcagcaaatgcgaggtgctctggacctgatgagcaaagaattgcagcgtgcgggctacgtgaactggcagaccgcctggggtctggttgatgtaaatggagatggcgtggttgatatcttagacttttatgaagcggtgactcctgtgctgaacgagatgggtcgcatagaagtcagtgatagttgcattctttattcatacgacttagatggggatggcggcaaaagcaccggtcaattcgaatcttttggcttccgcctagcaaacggagcgattcagatgcgcacggcaggggcgggtcacgcctgtgacaccggtacttggcaggctatcaccgactccacggttacgatcaccaatctcacctttgatctgacgtatgtcgacgatgccgcgtcgggcgattctaccatgtacgcctatacagtcgcgccgggtgcaacgtgggatgaaacaccactgacctcatgcgatccgcttgttgctggtgacgtgcccgatgagggcgacgtgatctgtctcggacgtcgtactgttgaaattaccgtagatggtcaactggctagcgatgcaaatgtaactcttagtttaaccacgcgcgcgaaagtcagaaacgaccattttaacaccagcaatccggcaccgtaa

SEQ ID NO: 1184 - DNA, 537 bp, Artificial Sequence
  Synthetic Polynucleotide
atgcaccatcatcaccatcatggtggttctggtgaggcaccggaaacggaagaaagtatgaatgcgatccgactctcacttgccgctggtgcattggccttcggcgggatactgtttgcgcagactacaagcggccaagacgcgtcggcagcgcagcagcctgccgctggagcagcggttcaagcccccgccggtccaggttacggcccgagagatgggtccggcccgggagagcgcatgcatcgccaccatcgtgaaggtaaacacggccatcggggaggcatgatgatgggtgcggatggcaaccgcgacggtaaggtcagccgtgaagagttactgtctgcacagaaacgtcagctggcgatgtttgaacgtgcggatgctgataaagacgggaccctaacccgcgatgaaatgcgcgccgctcgtgaagccatgagggaagagtatcgcaaacgtaaaggggaaccacgccgagatggcgaacgccgtgcgccgggagcgccgcaagcgccggcagggggtgcacagggttga

SEQ ID NO: 1185 - DNA, 429 bp, Artificial Sequence
  Synthetic Polynucleotide
atgcaccatcatcaccatcatggtggttctggtaaattggcatacctctttacgtcggccttaactctgatcgctcttcccgcgtgcgcgcaaggcgtcacctcacaggatgcagccacactggtggggcaggcggacactaatggagatggtaacgtaagtaaggccgagttcctggaacgccgaagcgaagcgtttcaagacctggatgctgacagatctggctcactaaccgccgcagaatttgagcttgcggttagccagcgcatgaaacgtttctcctcccgtgctttcgccaaagtggatacggatggtaacggcgtcattagccaggctgaatgggaccaatcgccgccacgcgcatttgataaactggacaaaaatagtgatggtgtgttaacgagcacagagagggaacgtctgaagtaa

SEQ ID NO: 1186 - DNA, 801 bp, Artificial Sequence
  Synthetic Polynucleotide
atgcaccatcatcaccatcatggtggttctggtgtagatacccacgcacatttaggactctgtgagccagcggacggcgaattgattgctagtgcccgggaagcgggtgtgtcgcgcatacttacagtcggcctgggggaagattcaaatcctgttgccgtgggtagcgctcaagcaaacgagggcgttttcgcgtctgtggggcgtcatcccaactccgcagatggctttgacccggcggcggcagaagccattgaagccctatgcgctatgccggaagtcgtagcggtgggtgagactggcctggatttttaccgtgatcgaagcgaaccggacgaacagcgcagagccttctctgcacagatcgctatcgcggcgcgcacgggtaaggcactggttattcacctgagggatgcggacggatccgaagacgccgtgtcagaggcgtttgaaaccctggatcgtgatggtgatggggttacggtcgtattgcattgcttctcggccggcgctccatgggctgagcgtgcggccgaacgcggttggtattgtagctttgcaggcaatctgacctatccgcgtgctgaagcgatccgcgaggccgcggcagtcgtgcctgacgagcgtttactggtcgaaaccgatagcccgtttcttgcgccccaaccggttcgcggtaaaccaaaccagccagcgaatgtggtggcgacagcagaaaggcttgccgaagtacgcggagttccgtacggcgctttggagcgtactgttgaagccaacgcggcgcgcgttttcggctggtaa

SEQ ID NO: 1187 - DNA, 1185 bp, Artificial Sequence
  Synthetic Polynucleotide
atgcaccatcatcaccatcatggtggttctggtgagacggtcactcgcaaagggcaacgatgcgaagatgcaatgtccgtatctggtatcgacgtttcacagggcttcaccggaacatggcagtcgggcctgagtcgtgtgcaaagccgcgaaactgattatggtgaaatggctcgtaatcttttggcggaccgggatggcaacggggatggtgccctgagcgcgagtgagttaggcatgtctcgtagccgctttgccgatctggacacgaacggcgacggtgtggttagcccagaagaactcgcggcacatctggagaagtccgggaaaggtgataatcccgcgctaagacgtatggccgctgcaattatacaggaacaggacgcggatggtgatggaaaaattagtcgcgccgaatcgtctttttcagatgaggaatttgaagcatgtgacaaggacggcgatggcttcctgaccgaggatgaactcgtacaagctatgggcgggggaggtggcggtgggctggaaggcgccatgaggaacgcggctgagggggacggcagcccggccggtgacgatcgtaaaggaaccttcccgctgggcgaggaagaacgcaaaaaagcgtcgggccctagcgtgacccaggatttaaacggtgatggcgtcgtctcagcggaggaaatgcaggctgtgttggaacacggtttggcgaaagcgcgggcgatggcagcacgtggtgaactgcgcttggagcgcgttggacttgccgatgtctcagggacgccggaagcagttggcaggcccgatggtccgggtgggccaggcgagtccaatggtccgggagcggcggctgaaaccggcgtcgccggggccgtgtccacagcttctcgtaacggtgcaaaaggtactacgggccatcgcggtcgcaatgccggctcagcggcaggcaccgcggcagcatacatgacacaagaaatggcggacgcgggtgaacagacccagggcgcagccgccacgcgtccagcaccgccttggctgctgcgacgtgccatggacgcttatggcgatcggatggccgatagtgcggaagcttacgcagcaggggcgggaacggacgctgctggtcgcccgtatcgtgagcgcggaatgcctctaaccggaaccgtgtttgcgggtcagggctaa

SEQ ID NO: 1188 - DNA, 984 bp, Artificial Sequence
  Synthetic Polynucleotide
atgcaccatcatcaccatcatggtggttctggtcaagacttcttttgccagccctgtatcgctgcgatgccagccgcaaaattttggttaatattccttgccattacgggtatctccctggcgtcactcttggcagcgaagagtaattttctgaaagcccgactgattgaggatatgcctactagccgtattcggtctgcgtcgcaggggtatgtcgaactggctggactggcaatcagccgtggcgaacgcctaacagctccgttaaccggcgatccgtgcttatggtggcgctaccgcattgagcgttatcagaaaaccggtaaatcgagctcttggtcgacggttgaccgcggcgtgtccacccaaccgtttttcatggatgatcgtagtggtatatgtcgtatcgaacccaccggcgcggaaattagctgcctacaccgccgtgtatggtacgggagtagccgattgccggccacatcaattctcaacgtgaaaccgggttttcttaacaggctgcaaccactgtgggggagcggccggtatcgctatactgagttcacgattaaggaaggggaccctctgtacctgctcggtcatttcgtatcggattcagacggccgcaaaatcctatcaatcgatcagattacggcacagcttattcgtcattggaagcaaaattttaacgaccttttgcagcgctttgatcacgacggtgatggagcgctggataataaagaatggcagggcgttcgtgaagcagcggccgaggaagctctgcaaaaccagcagaccgttgcgggcgatgatgcagaccatgtcgtgactaaaccggaggattccggcttaccgttcctgatcggatctcacggccaggaacatctgagtcgtagatttcgctggcgagccttagggtctgccgccgcatttctcggtgcgggttcactggccacctggctggtgtcctcgcggctgttgttttga

SEQ ID NO: 1189 - DNA, 597 bp, Artificial Sequence
  Synthetic Polynucleotide
atgcaccatcatcaccatcatggtggttctggtacaaaattaattaagaaaagcgcaaaagcggctatcttgatggcctcagttggtatggtgcttacttccacgggcatggatgcgcgggctgagacggtcaccgaaaaaaccatagtaagtcagaaggaaattcctggagtgcacaaaatcgacttcatgtcgtttgatgaaaataaagatggcattctggagatgaaggaagtgggggacgttctgtttaccgccttcgatcgcgatggtaacggggtcatcgacaaccaagaatttgatgagaatccagtaatgaccgttattcccacggaaaaaaccacatacactttctatgactataactctgacggtactgcggagaaagcagtgatgacgcaggaagattttctgaagaaatcgagcctcatgcgttttgacacccaatacaatggcctgagtccgaaagatttcatcggcaaatctttcaaagaagtagatatgacccatgacaacttgctagatcatgaggaatggcagcgagtttatgcggatatagtcaagccggaagccgcactgcaaagcaattataactaa

SEQ ID NO: 1190 - DNA, 774 bp, Artificial Sequence
  Synthetic Polynucleotide
atgcaccatcatcaccatcatggtggttctggtaagaaatctacgactttgttcccccttagttttgcactcgttttttcggccagctcagtcttcgcgagcgcttcctcaaactttgaagacgagacaggagcgccattaatttcgagctctataaccgtggaaccggtactggtggaagaggaaaaatttgatccgcgagataaaaatcacgatgggaaggtttctatcggcgaacgcattcattacttcttcgaccgtgataaagacggtgatgtggattttgatgacttcacgtatgccgtcaaagagctgtggggtaaggtgaaaggcatctttgacaccaacggtgatggcaaagtcgaatttgatgaaattatcagtggtacccaatcggctctggatcatcttgacagcctggcggggcgcgttttagctctctccggcggaatccaggagtcgggctatttcgacctgattcctgaacaggttaaagggccgttgaccaatctgtttgcgattgtagacgaggcagcggaaaaaactcaggccggtgtgaacattggcggaggctacgttgatcaaattgaaagtgcactggaaaagctgaaaccgcagatctccaacctgttaaaaggtggggcgagtgtagaggacatgggccaagccaaaaaagatattttcgcgtatctggaaatgatcaagggttggtacaatacaggtgataacgccaagcttgtgaccagcatcgaaaagaaactcgcaaaagcttag

SEQ ID NO: 1191 - DNA, 1074 bp, Artificial Sequence
  Synthetic Polynucleotide
atgcaccatcatcaccatcatggtggttctggtggattcaatatcgtgtctcaagctcttgccgaagagtcctcggatgacggtgatagtgggtcaggcgacgatgatgaaaaagagagcgacgatcagagcgatgatgaacagtctgacgaccaatccgatgacgaacagagcgatgaccagtccgatgatgaacaaagtgatgaggaaaagtgtgtcgagattgaagaaacagagtcggacgatcagccaaacgaagagacgtgcgataacactgaaaccgatgaacagtcggacgatcagaccgagcagacggaacaaagcgacgatgaacaaagcgacgatcagaccgagcagaccgaacaatcagatgatgaacagtctgacgatcagacagaagataaagaagcggcacaaaatgaagaaacgtcagatagcgtaattggtagcaacgttcccactgtgctggatgttatattaaaagacgacagtctgttgaaagaagtcgtggacgataataccacggaaagtggcctggcgtcggccctcactgacatccaggaggagcaaaaccaaccggcggttgaaacctgtgcaaatgaagcggacgacgacggtgatggcatgattgatgaaaactgccagcctctgacgtctaccccggctgagacttgcggcaactccatcgatgatgatggggatggtaccattgacgaagaggaatgcgtggtaccaccgacagaaatctgtgataatcaactggatgacgatgttgatggaaaaaccgataatgcagacgaggaggattgcagcgccattctgcctgctgtcgtgatagagagtgcggaggatgaagaaggtgagccgctttcgcagggcgacatgattgccccgggggaagtcacctttactttttccgcaaagacgaacgaaacatctcagagtcagggaaacctccatgactacaaattcgaatgtgcactagacggcaagagctttaattcgtgcaattcgcctgaaaccgtaaaattaacggacggcaaatataccttcgtagtgcgattgacgtcctga

SEQ ID NO: 1192 - DNA, 465 bp, Artificial Sequence
  Synthetic Polynucleotide
atgcaccatcatcaccatcatggtggttctggtgctggccggcgtctcacgccggcgcctgaagacgagtttaatattatgttccttaaagcctttcaaatcatggcacgccacttgctagtagtcaagtgcgcggcaggagccggtgcgcgtaccttaccacccccgccggatgccgcgcgaccccgcttcctgtcgctgccgaaagaaacaccaataatgaaacagaacactattaagaccatgctgatcgctcttagtctggcggcagcgccggtggctattgcgcaggttccggcctttgaagagctggataccgacgggagcggcatgatcgatcgtacggaagcctctaacttgccatgtctgcatgctaattttgacgcaatttccaaagcggatcctaacggtatcggcccggatgagttcagccaagccttaaacgatttttgctcaaatctgtga

SEQ ID NO: 1193 - DNA, 1071 bp, Artificial Sequence
  Synthetic Polynucleotide
atgcaccatcatcaccatcatggtggttctggtaaagagtcgcaggtaatgcattctcgcagtatcgcgtgcgccgttgcactcgtcttggtggctactgcgcaacttgccaacgctcagggtcgggggcgagcacgcggacacgtggtaccctatcgttttcaagaaatggacacaaatcatgatggcattctgcaacgcagcgaatggaccggtaccccggcgtcattcaggtcccacgattggaaccgtgacggcatgttaagcggcgatgaactgcgtataggtcgtggccgcggggcccgtgcggagggcaaggatgatgactttgactcggcataccgtgaatataattacaacgattggacggttcagggtttcacggggctggatcataatcgcgataaccgcattacccgggacgagtggcattatgccctagacgaatttacactggcggatcacgaccacaacggctggctgagccgcggtgaatttttaaatgaggggacgaaccctatcgatgatgatcgtgatgatcgtttccgttacttggacgcaaacaacgacggacgcgtctcaaggtccgaatggcatggcgcgaccctgactttcaatgcccttgacaaaaatcgagatggttttctgacccgggctgaaatggtgggaactgaaccaccgccggacttatttacgtccgtggatattaatggcgacggcaatatctcattgcaggagtggcattggagtcgccagagcttcgatcagcgcgatgcgaacaaagacggtcgtctgtctcaagaggaatttcgaggtgcggcgattccagcttcgaacgcagccgctgcgtatcgtgccggatacgatagaggtctgatcgaaggccgcaacgcaggtagggaggacagagtcgttaataaatattgggacctcgagggacagcgcgaactggaaaccgcggatagcgggtaccaagcctcaatgggcccgaaggatcagtatcaggccggctatcgtgaaggtttccggcgcgcgtaccgcgaaggttgggaccgtccgacaacccaatag

SEQ ID NO: 1194 - DNA, 462 bp, Artificial Sequence
  Synthetic Polynucleotide
atgcaccatcatcaccatcatggtggttctggtagaattaggatcgttttccctctcgccgcttttgcggcattcttacccgcgaccggcgccctggcagcgccagggggtgattttgaacgtgctgcccaagagttgcgcgacgcggatcggaacggcgacggagcggtatctcgtgcagaatttcagcagtatcgagtcggtcgctgggcgaaaatggatcgtaatggcgacggttacttcagtaaggatgatcttccggccctggcgcgcagccgttgggattccgatcgcctgactcaactgcgtagagactttgacaaaaaccgcgacgggcgtatatcgcgcgcagaatttgtgggcggaccgatgccgatgttcgaggccgcagattcaaatcgcgataaccaggtgagcaaagctgaattgcaggcattaggtcaaaaagcgaaggttcgctag

SEQ ID NO: 1195 - DNA, 300 bp, Artificial Sequence
  Synthetic Polynucleotide
atgcaccatcatcaccatcatggtggttctggtatgaaacaccaccaccaccaccacggtccgggcatgcagatcttcgtgaagaccctgaccggtaaaaccattaccctggaagtggaaccgagcgacaccatcgagaacgttaaggcgaaaatccaagacaaggaaggcattccgccggatcagcaacgtctgatttttgcgggtaaacagctggaggacggccgtaccctgagcgattacaacatccaaaaggaaagcaccctgcacctggttctgcgtctgcgtggtggctgataa

SEQ ID NO: 1196 - DNA, 759 bp, Artificial Sequence
  Synthetic Polynucleotide
atgcaccatcatcaccatcatggtggttctggtaaaaagtatatcgcccttagtctcattgcgactgctgcgaccgcacatgccgaaccagtaacgattaccatccaaggtgaggttttttctaatcgtataagcacaggacccttggcaacggtgtcgtcaggggataccgcgagcgtcactttccgagtggacagtgccgttttctttgattccgtgcctggcgatttacgcaaccacgacgtcgaagctggctcttttgcgatggattttccgagcgtctcgaccacaattgtaagtggcacggaagcattcttcaccgttgtggacggttttccgatgtccgatgggtttatcctgtcgaccagccgcttctcgtcaggaggtgttccgctggagactacgccatttcagttgggcttcgacctgggttacgtgggcagcacccttgggtctttagatattctggaagccgtgggcgtctatgacttcacaggcctgacccggtttaactttacgctgtggcaggcgttccccgataatgtggtgatggagatggacttcgtttcaatggaaatcgcgactgacgcatgtccggctgatctcgatggagatggtgaactgacactatttgactttctgcaatttcagaacctgtttgccacgggtgatttggcagccgacttcgatcgtgatggtgacctgaccctatttgattttctggaatttcagaatcagttcgcgctgggctgcgaatga

SEQ ID NO: 1197 - DNA, 450 bp, Artificial Sequence
  Synthetic Polynucleotide
atgcaccatcatcaccatcatggtggttctggtcaggagattcgcgaagctttttctcttttcgaccgagattcggatgggaagttagaagccgacgatctgggaagctttctccgggcgttgggccgtaatcctactgaagcacaaatccgtcagctggccgagacaacgacctccgcgggttttgcgctgccggatctgctaggcatattagctaggatgccagcagtagaccccgcgcagctcgaacgtgagctgcgtgcagccttcaaagtgttcgataaagaaggtaaaggcatgattccgtcaggtgaattacgccacatcgtcaccagtctgggggaacgcttgagcgaggccgaagcggatgaaatgctgaaggttgctgatccgacgggctcgggcaccgtggactacgaacaatttattcgcgtcatcgtttccgcctaa

SEQ ID NO: 1198 - DNA, 891 bp, Artificial Sequence
  Synthetic Polynucleotide
atgcaccatcatcaccatcatggtggttctggttgtattaatggcccccagtcccctccgcgccgtagtaacatgaagatacggtactttgccacagttacgctggcagcttgcgcgctaaccttgccgtcgatggcggccgaggtcggaactgctccaaaaccggaacgcgcgggtgtacaaacccccgcaacggtgagcgccccggggaaaatgatggcgcgtttacgagcagcggataccaaccaggaccgtcaagtgtcagccgaagaatttgcagcccagttccctaatgctccagcggagcagttcgctcgccttgatagaaacggcgacggtcatatcgatcggcaagaccgtgaagcggcctctaccccggatgcgcgcccggagcgcactgctaaaaacggcccgccgcaggatgcaacgacatatctcaagaaattggttaaacagcacgatgccgacggtgacggtcgcgtcacccaggcggaagtggaagcagctaaacatggctttccacctctggttttcggggcgctggatcgtgatggagacggtgcgctgactgctgcggatgccgcggcacgaaccgcgaaagcccctgcggcagaaaaaccacaaggtgagaaaaaggccaaagcgaaggccgcgggcaaaccgcaagaagaaatgaaggctgccaaacaggagaaaacgacgccgggcgagacgccaatgaagaatgctcgccaggaaaaacagaggccggctcttgatgtgaacaaagatggcaccgtaacctttgaagaggccgtccaagtcaatccaggcctgactcgcgaacgtttcgacaaacgtgataaaaatggtgatggagtgctgacaaaagcggacagggctaccgagtaa

SEQ ID NO: 1199 - DNA, 1938 bp, Artificial Sequence
  Synthetic Polynucleotide
atgcaccatcatcaccatcatggtggttctggttcgcaccgagtggtaaaagggcccgctaccggaatttggcgccgtttgctgatgcatatgaagtgttttgccttagcggtctgctgcggcatggttgcatgtgcgagccagccagcctcagcaaatgtggttgatgcgacgtggataagtaacacacaattcgtatatcgggtggcttttgtccctgacttcgatcagcgccgttccgcgctgccggtgaacggcagcaattactgcgtcccgaccagctttatcaactggtctgcctatatcgcaaggcgcggtaacccgactcaaccgcctggtccaccgccctggagttacccagagatttcgctcaatattctgacgctgggctttggtatgaataccgacccggatggtggcactaacccgtcgggtggggttgctggcgcagccaactggctatccggccgtgcgttctgtttcgtggtgacagggaatacctccaacggctttccacgcctgagaacgcttgctaataacgccatcaacggtaattgcctcgttgtaccgcgcgtaggttggtataacgaatctaactacccgcgtattaccagaagcgggggacatgcggtttcaatggtgcgtgcagcggcggcaggcagtgccaatcagattatcggcttacacgatccaaattggacgccctctggggacaccctgaccgtccaaagccagtttacgcgcaacgattatgccgtagaagaacggcttgttttcgagggagcctctgcgattcctactacaatgtcccgtatcatgggttacggaggcggttatatttatggggcgtattacatcttgccgtacgtcgtgctgaccccggtgagctttaatttccaggttcattcgcttggtttttccaacgccggagtacagaccactacaatttcaaatccctctttgggcgcggttacttccgtgtttcagggcatgacgccggcagaatatttctataccgccaacaacgcattcagtccgggcggaaaactggcgcgctacagtataaccgatgacagccacactaccttactggaactgggtgacgatttcgtcgatgcaatcccgagccgttttgatacgatttttgtcatgcagggccggtcacttctgcgcgtgaatccgaataacccagctgcccctgtagagggttctcaagttatcggattggggattgtcgacctggcgtacgatgatttaaatgaccaagtggtaggcctgcgtcctggggatcgccgattggtccgcgtcaaccaggccctgaacggcgctaccccgatcctccaatcgattcccacccagatacctgtgggcacggaaggcgaaattgatatccgtccaggcgatgggagcgtgctgatcgcgaccccggcgagcacttcagcgtatctaatgaaaccggtccccggtgcagctccgatcgtagaaacgatttccattccggggaacacgttcccgatcactggtggttcgttcaccgaccgtggtgtcatcttagttgcgaatggccggatgcgcgaattgacaccggatgctaataacgtgtggttgctggacccaacatcgccttttcaaaatatacccgcttcaactgggaaaatctacgcaggtcgtagccgcacagatgtagaccgtgctaccgagaacgatcccgcgaacgacgacattccatcatttgattttagtggtgccactcatgttattgcttgtccggcggacgtgaatggtgacggcgtggtgaactttaccgatctgaatgctgttctcacctctttcgggcaggcaggcgcgaatccgccgggcgatacagatggcgatggcgatgttgatttcgaagacctaaataatgtgctgtctaacttcggagcggattgcggatga

SEQ ID NO: 1200 - DNA, 1512 bp, Artificial Sequence
  Synthetic Polynucleotide
atgcaccatcatcaccatcatggtggttctggtcgtggtatcgcacggcagggcaaagcccgacaaggaaaggctcgtcaggcgattgtggtagggtgtatgacactcgtcgccttatgcgcgcgctcggaggcaggcgcgcccggtgacgttaacggcgatggagtggtagatacgtacgatttgactgccctggtcgaagcggtgaatgctagggttccggccggggcggctatgcgcgcagacataaaccgcgacggtcgtattgatagtcgtgatatctccgattttctggcccttctgtctggcgcgcgcggtgacctgtgcgaagttagctattggccatgttgcgaatatttgccgccttggggttgttgcggcgacatcgatatttgccaggatgatgacgagaaagacgatgtgggcggcccgggggacttcgatgccgatggcggtggcgatgtgggcggtggaggtggagtgacctttattagctgtgacgactgtgatgatttccgtgcatggggtccaaattacgctggtccgggcgacccggtaggtgcgtgggccaccacgacctcacccggagtcttttgcgggcgccgcgtttcaattgaaatcattagtggcgctcacctgttagttaacggcgttgcgggcgatactcctggtaccgtgcgactacgggcaagcgtcgaactgccgaatgggacgatctgcgaggatacgcatgaagtacaaattgtcagatatgagcctgtgcgcctccgttatgctacctttatcgaatgttccctgctggctaacccgggaggttggataccaaccgttgcgtcggattacttcggcggggatggacgtggcccgtcctctacagcagccagctaccgcagttgccatgaaatcgacgtagcaccacaccagttttctgtctcgggcccggaaaccttcccgtatgacttgactccatttggtgtgactaatgccgttgcgcctccgttcggtacaagccatggctattcatcgagtacagtggtgtccgcgccgcccccctgcccgcacagcttagcagcgggcgcgacccctgtgacgatggcgaccttagccgtctctgccccaccgatgaccacgtttgggggttcaggtgcatcattcgttgctacgtacagcggcaaccatgtatcttatgtccggcgtctgagcccctccgtagtgcgtgtttatttttggctggctggaggtaatcctctcttcgtgggagcgccggcgattaacggttacgtgaggtggactcttatattcggggttaatcaacagaccggcgctcgccagtctcatgtgtcttacgatggtatccacaacgcctttccagcgcatgagttgtatattaatggaattgccctgtatagtttctccagcatctctgctggcacgactccagcggcgctggcagttccgctgaacgaggtcacttcaccacaatttggcgccagcgtcttaatccagaattaa

SEQ ID NO: 1201 - DNA, 654 bp, Artificial Sequence
  Synthetic Polynucleotide
atgcaccatcatcaccatcatggtggttctggtgcttcacgtcccccagtgctggaccggcgaggactcttagcaggggccggtgcggcgctggcccttgcggctgcaccgctgccggcaagagctcaaattttctttgatcctacgttgcgcgttctcccgggcatcctggtacgtcagggccgcggttaccgcccgctgttggattctgtgggcgaagtccgtccagttacatcgcgtactggtgacctggccatgccggataccagtataccagtctttgagttccccgaaaacctggcggtgtttcgcaattatgacttggatcactcccgcttcatcagcaaacaggaagcgatgttagcgtggctcaccttaatggccggaattaggacgggccaacggttgggtcccggtgatctgcgacagcgtgtcgcccctgagggcccggacgtaccgctgtattacgtggaactgcctcgtaccgatcgccgccagatttggcttcttctgaaggaaactccagatggtgcgaccctgatccgtgatatggaaacgtttttaagcaaccaaattgccctaggccgggggccggtttggctgaatggtttccgtcagggcggtatggagagcggcaacaggagggggcattaa

SEQ ID NO: 1202 - DNA, 819 bp, Artificial Sequence
  Synthetic Polynucleotide
atgcaccatcatcaccatcatggtggttctggtagttcccttcacagcatacaacgcggctttactttgacagaattaatgattacggtcgctctgtctctgaccgtaatctcgtcagttctggtggggtatctcggaacgtacagcggtagcatgaacaccctgaatagttctaaattgaaccaggagctctcggcagtgatgtccctgatgattgccgacatccgaagggcgggttataatggcagcgttgcggctagtgaaaccccaaccgccaacgtgttcaatactgtcgattctacagcgttagaagtttttgatgacatgattagcaacactcaggtggcaacgaccgggaatggctcgtgtatcgtatacgcctatgatctggatcaagatggtgtcgtcgacgcgaacgagctagtgggcttccgtctgaacgcaggagttgtgcagatgcggactgtaggtaatgtggcggatcccgacacgtgcgcgtcatcctcgaacacctggaccgacttaacggattctgattttattaccgttaccacgctgaatttcgacctgtccggcagcgtttgccttaatacgcgtgaacctgatctggtcgattcagactctgacgggaccgttgataacgccgaagaaggtaattgttacgtggcaccgctcccagccgcggcctcaggcgatatcaccgtagagacgcgtcaggtagatattacgcttgctggcaacttaacggatgattcgtttactcgcctgagtcaagctcagtcagtgcgcgttcgcaacgacttgatacgtatccgatga

SEQ ID NO: 1203 - DNA, 654 bp, Artificial Sequence
  Synthetic Polynucleotide
atgcaccatcatcaccatcatggtggttctggttttctgcgtcaaggggtccgggttatgaagaaaaccattatcggtttagcattgcttacgactgccattgctggcacagcgatcgcgcaggcccctgcgcgcggaggcgaccccatgggtgataaaaccgtaaccaaagcagaagcgcaggctaaggctgccgagatgttcgcaaaaatggatacgaataaagatggcaaactggacgaagcggatcgcgcggcccaccaaacagcaatgtttgatcgtatggacgcgaacaaagatggtaacataagccgagatgaatttgctgccgctcatcagagaaaggacggcgacgcaaaagccgcaggggagcatcgcatgggagaacaccgtatgggtcagcatcgtcgcaaaatgggcggacacatgggcgacggtatgatgatggggatggccgatgcgaataaggatggcgtggtgacgcgtgacgaaatgaccgcggcccatgctcgaatgttcgatatggcggacgccaacaaagatggtaaactgactccagaggaacggaaggcgcaccatgctcaaatgcgccagcacatggggaaacgtggcggtgaacatgcaggtcatatgggtcacacgccgtccaaataa

SEQ ID NO: 1204 - DNA, 1917 bp, Artificial Sequence
  Synthetic Polynucleotide
atgcaccatcatcaccatcatggtggttctggtcactgcacagaaagccgtaccggcatgacgactttaccttcgcatcaacgcaccccaacccagatgcgggcgatgcgtcatcgcctgttttcaacgaatacacccaccgagcgctccgttcagccggtgcgtagtgaattgccgcgaagattcggtcgcgtatctcttgtcctgctgggaaccgtggccacgttagttctcgctgggggcggtggctattggtggtacactagggcaagcggtcaggcggctggttcgaagtccaaaccgatcctggagctggtagcccggggcccttttgaccacgttgtgctagaaacgggagaaattgaaagctctagtaacaacgaggtcaaatgtgaagtgaaagcacgagggggcaatggtactccgatattggaagttattcccgagggaacgatcgtcaaaaaaggcgatttcctgtgccaactggattcatctgcgctcgatcaggaagctaagacccagcgcattgccgtgtcagtagcggaaagcatggtgatctcgagccgtgcagcggttgagaaagcagtgatttctaaacaagaatatctggagggtacctacttgaccgaacgtcaggccattctttccgaaatttcggttgcccaacagaacctgcgcaaggccgagctggcgctgcaatccgctgaacgtctggcggcgaaaggcactctaaaaccgcttcagattgaagccgaacagtttgcagtccaaaatgcgaaaagtacgctggaatccgcacagggtcgcctacgtgtgttagacgagctgacgaagcagaaaatgctggttcagcttgatagcgacatcaacaccgccaaggctaaattagaaagcgatgaaacgagcttaatggaggaaagagataaattggcagagatacaaacccagatcgacgcttgtaatatccgtgcgcccgccgatggccaggtagtctatgctaacaaatacggcaaccggggcggatctgacttcgtggtggaaccaggggcgtatgtccgcgaacaacagacaatttttctgcttccggaccctacacgtatgcaggtaaaagccaaggtcaatgaatcacgaatcaccttgatccgcgaaggcatgccggtaaaaattcgtgtgggtgccgtcgataatgatctcttcggacgcgtggttaaagtaaacaagtacgcagaaccgggtaactggtttgggccagcggtgaaagagtatgcagtgtttgtccagattattgatcctccgagggaaatcagaacgggtatgacagctgaggtgcgcattttcgttgaacaaatcccggacgctattcaaattcctatcctggcggtatatgaaaccaagcgccatcatttcgttctggtacagaatgggagtgcctttgaaactcggcccataaaaattggcggggcgaacgataaatttgttaccgcgcaaactggagttaaagtaggcgagcaggtcgtgcttaatccacgcaatcacctggataagatggacttaccagagatagtcgaagaagacgatagcgaagcgttcgcaaaattaagtgctgatgtgccggcaaccgcgagctactctccggcgggcgaggctcgtacacaggaacgtcgtaacggtaatggcccggatatcgccgcgatcgtccagtccatctttgagcgattagacactaacaccgatggtaaaatttctcgcgaagaagcccaagcggactccgattttggcgcacgctttgaagatggagatctgaacaaggacggcttcatggacaaaggcgagctgatgtccggtatgcgtaaaatgatggccgcccgttcggccggtgggatgggcggaccaccgggtagccgcgggagtaactaa

SEQ ID NO: 1205 - DNA, 915 bp, Artificial Sequence
  Synthetic Polynucleotide
atgcaccatcatcaccatcatggtggttctggtaggtggcagttgttaagttgggtctataaatgggacagcccaaaggggcaaaggatgaaacacatcaataacattatatacgtactttgcacgctgctgctcgcagtttctatgcagctgaacgccgctaccgagctcaaaattatcacactgcaacatcgtttcgcggaagatattgtgctggcgatcgaacctctagtgggatatgatggttcagttactgcgattcagaatcagttgataatccgcacccaatcgtccaacatggccaatatcgaacaggtagtgaacgcactggacgtcgagcgaaataaccttaaaattaccgtcagtcgtcagagcaatctgaacgattcagctgatggctttacggttaacggtcgcaagcgtattggcaatgtggaaattggtacgcgccgttttctcaacaatagccccgacggcgtacaaatcgggatcgaaaacaatcagaataacacattctcctcttcgaatcaatttattaacgtgatcgatggcgagcgggcattcattcgcgtgggtcagtcggttccgtttactcaggaatgggtagttctgaccaatcgttacatcagccagcagaccactacggagtttgtggatgtcagcaccggcttcgccgtacggccgcgctccattggaagtcaaattgaagtggaaatcacaccgcgaattgcgaaactgaaccagtcgggttttattgactttgaagagttaagcaccgttgtccgtgttaacaaaggacaatggttggatatcggcgggattatgcagcagaaagatgaagtgtcaagagcgatcctgtcccgccaaaatgcaggccaaaaccaggacaactcactttctatacgtgtagattag

SEQ ID NO: 1206 - DNA, 381 bp, Artificial Sequence
  Synthetic Polynucleotide
atgcaccatcatcaccatcatggtggttctggtgctcccgcgcctgatccggaagccttaccagtcaccgacccggggtcgttgcaaggaccggcaccaccggaggtttcagaactcacgagggaagagcagcgctttttccgttacgatcgcaaccgagacagactaataacacgtaatgaaatgctttccactcggtctgatgcgtttcgcgatctggacgccgatggtaacaatctgctgaccttcgaggaatgggcagtgactacggtagaccgctttgaaggcgcggataaagatcgtgacggtcgtctgacccctcgcgaatttgccacgacagcgccgaagcctgtggctcgtaaaccggcgtgtaaatgctag

SEQ ID NO: 1207 - DNA, 429 bp, Artificial Sequence
  Synthetic Polynucleotide
atgcaccatcatcaccatcatggtggttctggtaaaacttatattttgtctatcctcctgttagccgcagcggctcaacccgcgctggcctcgccaccgtccgcagctgacctggataaccttttacagagtggggatataaatggcgacggagtggtttcaaaggaggaatttctgacactgcgcgcgggtatgttcccggaaattgatgcagatgccagcggcagcgtatcccagtctgaacttaaagcggtcctgaacgatagggtgagccgttttgcgtcgaaagcgttcaagaaaatcgacgccgatggtaatggggccattagtgaggacgaatgggctggtggccctgctcgaggctttgacctcgcagataaaaacaaagatggagttttgtcagcggatgagcgtacgcgcaaaccgtga

SEQ ID NO: 1208 - DNA, 636 bp, Artificial Sequence
  Synthetic Polynucleotide
atgcaccatcatcaccatcatggtggttctggtggaaaacaaaattccaagctgcgcccggaggtgttgcaggacttacgggaaaacacagaatttacggatcatgagctgcaagaatggtataaaggcttcctcaaagattgtcccactgggcacctgaccgtcgatgaatttaaaaagatatacgcaaacttcttcccttatggtgacgcgagcaaatttgccgaacatgtttttcgtaccttcgatactaatggcgacggtaccatcgattttcgcgagtttattatcgctctttcggtaacctctcgtggcaaactagaacagaaactgaagtgggcgttcagtatgtacgatctggatggtaacgggtatatttcacgaagcgaaatgttggagattgtgcaggtccgcccaggaggcggtgccgggccgggcggtggcgcaagtgctgacccagttcacagcggcacgatgcgttactcatctgcgcgtctgtggacctttggtgcaacgtggctgccggcgccgttaagttgcccgtccgaaaatgattggctgtcccctggccagcgcgccgatggtgacgaaaaaagccattgctgggcctcgcaagtggtggcggctgccgtataa

SEQ ID NO: 1209 - DNA, 459 bp, Artificial Sequence
  Synthetic Polynucleotide
atgcaccatcatcaccatcatggtggttctggtgaatctgacaaagccgctgggcgaatggcgatatcacggtttctcattttgggagttgcatccgcgcttttaacgggcggtctgttcatgtggcccggttacacccagatcgctgccgaggaagtcctgctggatgcaccgccagcgctggcagcgatcccggtggccggcgccgatgcgcctaagcgcggtccggcgccaccggcattacctgcctcgaaagatgcgagccgtgaagagcgtcgctttaacaggttcgaccgcgaccgtaatgatcgcattagtcgggtagaactcatgtccagccgtacagctgcttcacgcaaatttgataaagacggcaacaatctgctaacttttgaggaatgggccgcagcagcgggggaacgtttcgcgcggcctatggtgattagccgtgccatctga

SEQ ID NO: 1210 - DNA, 1779 bp, Artificial Sequence
  Synthetic Polynucleotide
atgcaccatcatcaccatcatggtggttctggtgtacgcagtcgaacgcgtattcggggagctgccgtgacagcgtttaccttggtcgcaggctcggcgactccggttctgggtgccgacgcgacctatcgtgtggttgcacgcacgggtcaattcgcgcccgggggcggctttttctcaacctttggtgcccctgctataactgccaatggtcgtgtagcgttccgcgcaagcgcagtgggcgtcctcgccaaccgtggggtgtggtccgaaggactttctggaatgaacaatctggagagcgttatgaggttaggcgatgaactgccgggtctgaacggcacctttgtggctacagcgaacccagaatttggtggcatcattttgaatgattcgggggagttggcgttcaatgtccgcatcacgggcgcacaggctgcctttggcgacaacgctattgtagtgcatgatgcgaacggcctgagatctattgcggtcccgggccagctcgttagcctgccatgcggtggtctaggttgtcaacgttggatgacggaagtgggggccgaatttttcgctttcaataatgccggagaggtcgcttacaccaccaccgtggctggcaccgcgatcaacccggacaacgaacacttactgatgtttaatgatgggagtacaaacgaagttgtagcgcgcgagggtgatgtgccgcccagcacgttcggggttgtttattccagcatgcgcggtagtgcaactcagctgaatgataacggcgaaattctcatgcgtatctacctccgggacgtgaatattaacgatttctattggtctgtttggcgcggtgcgccgggtgccctgtctatcgtcgcggccgagaactggacggcacccatgggcggagaatttggcgatggcgtctttggcaatataggggaaatgccatttaacaatgcgggtcatgcagcattcgtccagtttgtagaagacaaccaaggtgacaaccgtcttggtgtgtggcgaaacaataacgcgtcaacccaggccatttgcttcgaggggctacctgctccgttaggcctgacccaccggacgccggcaacatttctgcaatccatgaatccatctggcgcagttgcatttacgacagtggtggaggggccgggagtaaatgctgataacgacgtggcactgattcgtcgcatgccctttggcttacagactatccttgcgcgcgaaggcatgcaggccccgggcttgctcaacggagtcgtttttgatgatgttgcctggtcgggccagcaaattctggacgatgggcgtgtcgtgtttcgagttcaggtatcaggacctggtgtgcatgacggtaatgatggcaccctatggatcacgcgcgacggcgccccgccggcgctgctgttgcgtgaagggcagagcatggtcatcggcggtcaattgaagaccgtgggtgcattcatactgaccctgagtccgggctcggagtccggacgcaaaacgtcggtgtccgaattaggtcagactgccattcgagtaatttttaccgatgcgacagaagccattatcgtggctagccccgagagcgtttgtccaggtgatgttaataacgatgggctggtggatttttcagatctaaacgcgatgttaacggaatttggccaccttggggacgtcgtagacgcggacctggatctggatggcgacgtagacttcaccgatctgaatgcggttttatcgaacttcggtgtaaattgcaactga

SEQ ID NO: 1211 - DNA, 366 bp, Artificial Sequence
  Synthetic Polynucleotide
atgcaccatcatcaccatcatggtggttctggtttggagcgtgcggatactaacggcgacgggattgtcgatcgaggagaaatgcaagcacagcgcggtaaactcttcgaccggcttgatgccgatcgcgacggtgtattaacccgtgctgaagtggaacagcgtcgcgagcgtgttcgccgtagatttgcgggcggcgatggtacggtttttgatcgcgccgatacaaatcgcgacggtcgtgtgaccagggctgaatttctaagtggcgaaatgcccctgttcgaccgagcggatcgcaacggagatgggcggctgacggcggaggaaataggccgtgtcgcagagacggtgcgcaggcgctga

SEQ ID NO: 1212 - DNA, 933 bp, Artificial Sequence
  Synthetic Polynucleotide
atgcaccatcatcaccatcatggtggttctggtctgacgcgacttcgtcgggacgcagccaacatcactttaccggctctgcaagttgtcaccgtaggtttgatgctacagagcggagggggttggtcgttcggcgttccactgctgctcgtgacagcgttatatggctggtggcgctctgtgaagacgagtaggctgattgtagatacccctacctcacgtgtcgcgagcgcctcccagggctacgcagaactgcacggtagaggaaaaccgctcgatggcactccccttctgtccccagtgaatggtttgccggttctgtggtatcgcgtgcatacggagcgccgcaccagtgacggtaaatggcaacatgtcagcacgcacgaatcggatgcgtcttttctcctggacgatgggtccggcatatgcgctgtggatccggaaggcgccgatctaatggtacgtcgtcgtgaagtctacctgtcaggtgacgaccgccatacccagtggtcattgattaacggggatcgcctttatgtattaggaaattttgcgactctgggcggcgtgagccctgacttcgatatcgggcgtcagattcgtgatctactggagcattggaaaagtgaccgaccgcaacttattacccgctttgatctcgatggtgacggcgaaatcgatttaaaagagtgggaactggccagggcacaggctcgccgtgaagttctgcaacttagggacgaggtgatggcggcaccggaagcgcacgttatgcgcaaaccctccgcaggccgtctgtttctgatctcggatctggaccctgccgatctagcgagacggtaccgttggtggagctggtatcacgcagccgtgttccttggaggtgctggtgcggcggcgtggtttcatggcacagggggcatggccttctag

SEQ ID NO: 1213 - DNA, 1434 bp, Artificial Sequence
  Synthetic Polynucleotide
atgcaccatcatcaccatcatggtggttctggtaagacgatgctcctggccatgtttgcaatagctagtggatgtttcgcgcaaggctctgacgtctgcgagccccagcgcgtggtagcgcctgccgatgttccgacagtgtcaatgggtgcgaccgttatcactaacgggcagcaatggtttttatccgatagcagcgcatcgaccttctgcccgggcgaaccattgtcttgtggtacgggcgccgtatttgtctacgaaatggacgggaatgatcagcttgtgcacgtacagactattgtgccgcatgatgttcaactgtatgatggctttggtattagcatggacgtcgatggcgacaggctgatcgtgggtgtcccaaacacccagtggccgggtagtgaactgcggcagggagctgcgtatatttacgagcataatgacgaagagtgggttgaagttgcaagactacgtcctccgggggatatccgcgaacgcttcggttcaaaagtcgtgattgagcaaaacaccgctattatcaaagcagcgggcatcaatcgtttccacatgtatgaatttgtcgatggacagtggaacaacattgatacaatatcgccgccgacctccccaatcattccggactgcttcgcgtgttacatggccgcaggcggcgaatgggtgtttgtatcagcatattttgacgatgccctgacgcgtgatggcggtagcgtgttcgtttaccgtcgccgagctgacggaaccttggaatttactcagaaaatcgtcacggcggatgtggggtggttcggcattagcctggatttcgacggtagtactcttgccgttggagcgatagccacctcgcgcgctcattttggccaaggtgttgtgcgtacgtataccttagtggatggatcgtggaccctggagcaggaaatcacgcacgagcgtgcccgcgaaatgagtcgtttagggtctagggtgcatgtaagcggcgacaccctctttgcgacagcccagggggacgcaacgagttctcctactattaccacgattcttggcatgacatatatctttcaacgggatgcgaccggttcctggcgtgaggcgggtcgactgttccccaatccaactgggcgcaccctgcaatatggaacgggcattgcgagcgcgggctcgaaggtactggtcgggagccgcttggactgggatccgatcgaagggaccaccggcgccgcgtacctgttcgatttaacttgctttgattgtcagccagatctcgatcatgatggtgtgctgaccatctttgactaccttacgtttcaaactgcgttcggtacgggtgatatgttagcagattttgacggtgatggcgaactaacactgttcgactttcaggcgtttcagaccgctttcggccagggctgcccgtga

SEQ ID NO: 1214 - DNA, 447 bp, Artificial Sequence
  Synthetic Polynucleotide
atgcaccatcatcaccatcatggtggttctggtaaagcatgttccaccagtacaggagcggagtcgatgccgcacacgcctcaacgtcgcaccctcccatcattcgacgcccggtctgtaatgctgtttgctgcgttgactgtcggtggggccgcggcacaggcacagacgccgtcggcgcccagcgctcagccgcaataccagactggcccaggcccggccaccacgcaaccgaaggccacctttggtggcagctctaccgctactccgagcggttcaagtgcgagtgcgtccgcattcgaacgtgctgatgccaaccgagatggccagctgagcagcgcagaagctgggcagttacctgcgatcgcaaatcgctttcaagcccttgacaaagataaaaacggcagcctgtctcgtacagagttcgaagctggttcccgctcttaa

SEQ ID NO: 1215 - DNA, 813 bp, Artificial Sequence
  Synthetic Polynucleotide
atgcaccatcatcaccatcatggtggttctggtccacgccggtttctcatcttatcttgtgtcttgattttccgttcggcttccgggtgccgcagcgatcgtaaaaccgttgccatactgtggatgcaaagtggtcagcgcggattttgcgacggcaagggtggcgcacgtcgaatcagcctgcaaatgcgagtgactggccttcgtcgcaaaaggattaaatcagatccggaagggggtattacgatgaaaaagaccgtactaatgacaggcctggcggtggcgatcggtctgggagccttatcggaggcacgcgcgcagggcacgcagcagggtgccggggaaggcatgatgggtcagagaatgatgggccatggcatggctgggatgggagatatggcgacgcggttcgaaggtgcagacaccgacggcgatggtcaactgtcccgcgatgagattgttgcgcgtatgacagaacgtgccactgcgcgcattgcggcacaagccgatcgtatgatagaacaccatgacggcgacggtgatggcatggtgagcatcgaggaacttcaggcgggtcccatgagccgaatgtttgaacgcctggatgctgacggaaacggggctatttctccggaggaatttgcacgtatgcgcgaaatgcgccaggagatgatgggtcagtcaggcggaggtatgcgtggccaccatggcaaaggatatcaagggcacggcatgaaagggcatggtaccgccaaaggagatggggccggcgaacctggcgtcgtcatccaccaacatttctacaatcggtaa

SEQ ID NO: 1216 - DNA, 1869 bp, Artificial Sequence
  Synthetic Polynucleotide
atgcaccatcatcaccatcatggtggttctggttttaaacgcgtgccaatagtagttgtcattctccttatctccatcgcaatgcacgggcagcaacgtggcttgacaccgattaacgtcaatattgctggaaaggtgactcgactgtatgaacagtctcatgcgctggttatcggtattagtggctacgacaaatatggtcatggctgggatgccctgcggggagtgaaagatgacgttgtctcggtgaaagcagcgttagagatgaacggtttcaatgtagaagttctggaagatgccaacaaagagcaaattgaccgtaccatcagctcatttattagcaaatacggtatgcagattgaaaaccgcttgcttatctattatgcgggccacgggcataccctgccgacgagctacggcgaacagttagggtacatcgttcccgtagatgcccctcacccgacgtatgatcaggcaggattccaatcaaaggctattgagatggcgcagatcgaaatttatgcccgccgtatccagtcgaaacatgctctctttgtgttcgacgcctgctttgctggctccctgtttaatatgcgctctcccgtcagcgaagcgataacccaacgcacgattcaccaggtgcgccaattcataaccagtggttccgcgtttcaacaggtccctgatgaatccatctttcgtaagatgttcgtgactgcgctgaccactgatgaggccgacgtagataaagacggctaccttaccgggtcggagctgggtgattttctgtttaaaaaggtggtgaactatagctacaatacacagacgccaatgtatggcaaaattagaaacccgaatctggacaaaggtgatttcgtctttgaactaccgaaattcaccgataccatcccggaaccagtggcagttgcggattctacggcgaaagcgccggtccgtcctgccgtagcaagcacacccgttgcagcgcagaaaccgccgtcggaaccgatggcgccggttcggcgtgaagaaattgcaatgattccaagtgcggtcacggctaaatcgaggtcagaggacgccgctagcaacaggggtaatgtgggccatctcatgattcaatctccgctcgatggtgatttgtacgtggatggggttttcaaccgcgttatccaggctaatgcatcagttcctctgcgtggcgtaccggctgggaaacgccagttagaacttcggggcaaagagacatgggtgctggaagtggaagtgcgcaccaacgacctcgtgaatgttaagtttgaggcgcgagaaccattctattttgacctattttcggtcgagatcgccgatttggcgttccaaatgtccggaatccagggatctgattatagcactagaaaagacggccgtgatacaaccgtcgtaattccgaactttgcgatgatgtgtaatgaggtgaccgtatggcagtttcgtaagtttattgaagagacgggttatatgactgatgcggataagcgcactaatagttatgccagctacatactgcgtaacaactcacgcagcgcggcagaaaacgctaactggatgcactcatccgacggcgttatccgtaccccttcgacattcaaccatccggtagtacatgtgagttggaacgatgccatggcattcgcggcctgggtcagcgaaaaaaccggcaaaagatggcgcctgccaacggaggctgaatgggaatacgcagccaaaggtggcagtgactttctgtacgcaggttctgataccttagacctggtcggatggctgtggcgtaattccaaccgcgtgacacaggcggttgggcaaaaacgtaccaatggctatggctaa

SEQ ID NO: 1217 - DNA, 1779 bp, Artificial Sequence
  Synthetic Polynucleotide
atgcaccatcatcaccatcatggtggttctggtgtccgctcgcgtacacggatcaggggtgctgcggttactgccttcacccttgtagcagggtccgcgacgcctgtgctcggagccgacgcgacctaccgtgtggtagcacgtacgggccagtttgccccaggcggtggctttttcagcacctttggtgctcccgcgattaccgctaacggccgcgttgccttccgagcgagtgccgtcggcgtgttagcaaatagaggagtgtggtcggagggtctgtctgggatgaacaatttggaaagtgttatgcgtctgggtgatgaactgccggggcttaacggcacgtttgtcgccaccgcgaacccggaatttggcggtataatcttgaatgatagcggtgagctggcattcaacgttcgcattactggtgctcaagcggcattcggcgacaatgcgattgtggtacacgatgcgaatggtctgcgttcaattgccgtgccggggcagcttgttagcctgccgtgtggcgggttaggatgccaacggtggatgacagaagttggcgcggagtttttcgcttttaacaacgcgggtgaagtcgcatatacgaccacagtggccggcactgcaatcaatcccgacaacgaacatctcctaatgttcaatgatggaagtaccaacgaggtggtcgcccgtgaaggtgatgtgccaccgtctacttttggcgtggtttattccagcatgcgtggctctgcgacgcagctcaatgacaatggtgaaatactgatgcgcatctacctgcgcgatgtaaacattaatgatttctattggtcagtatggcgcggtgcacctggggctttatccatcgtagccgcggaaaactggacggcgccgatgggcggcgaatttggtgatggggtgtttggtaacattggggagatgcctttcaacaatgctggccatgcagccttcgtccagtttgtggaagacaaccaaggagataaccggctgggcgtttggcgcaacaataacgcgtccacccaggcaatttgcttcgagggcctgccagcgccgttaggcttaacccaccgaacgccggcgacctttttgcagagcatgaatccgtcaggcgcggtcgcttttactacagtagtcgaaggtccaggtgtcaatgccgacaacgacgtggcattgatccgtcgcatgccatttggcctgcaaaccattctggcacgcgaaggtatgcaggctccggggctgctaaacggtgtggtttttgatgatgtggcgtggtcaggtcagcaaatcctcgatgacggccgtgtggtattccgtgttcaggtttcgggcccgggcgttcatgatggtaatgatggcacgctgtggatcacccgcgatggcgccccgccagcactgttgctgagagagggtcaaagtatggtcattgggggccagttgaaaacagtgggggcgtttattttgactctgagtcctgggagcgaatcagggcggaagaccagtgtgagcgaacttggacagacagccatacgggttattttcacggacgctacggaagcgattattgtggccagcccggagtcggtttgtcccggagatgtaaacaacgacggcttagtggatttctcggacctgaacgcgatgctaaccgaatttggccatttaggtgatgttgtcgacgccgacttggatctggatggcgatgtcgattttaccgatcttaatgccgtccttagtaatttcggtgtaaattgcaactga

SEQ ID NO: 1218 - DNA, 1539 bp, Artificial Sequence
  Synthetic Polynucleotide
atgcaccatcatcaccatcatggtggttctggtggccctccgcccggaccaagacggcaccatgtacgccgagcgcgcagcggtcgtaaggacccgttgttcccatggactcgtcgtaatcatcagccgcgccgtcgcccgcaccctagtttacccgggcgtccgccgccgcaatttcatccgggtcgccctccaccacaccggaccggcgggaaccatcgcccgaaaatactacagtcatttcaccgtcatctgcaaccgggtgcaccccatggctggaggcatcgcctccgacacgctggacttcgtcagaaaaggggccgcggtggccgttctcgcctgggctacccccggcgacaccagccgacacgtgtgtcccgtcctgatcgccaacctggtctgcatggaatcctgctgccatctcacagccatcgaagagccggggatcagcagcatcgtttccctccgctgccgtcgcatcgcacgccgcaccctcgccgcttagcgggccacagtcttggcttgcagttggagccggaacccattctgccgagccgcctggtttggcgtcgtctcggtacccgctcgcccgccctccgtcgctcccgacgtctgcggccaccaccgaggccgccagcaccactgcgtctgcgtctgctctgttttcgcgaacgccgtaacgagccgcggcagcgcggccggggtaatgacgggccgttgcgtcttgcggatggccgcccccggcatgctaggccgatcccatggcccgatccacgcggtattttcccgcacccgcgtaacgacgtccgtgccttgcgcagacaacggggaacggcgtctagcgcgcacgcccaaaatccctcagcacctcgcaaaggagcccaggggccaccgctcagggcgggtggggctgcccgtaaactggcgcgccgtgaatccagattactgccgcgtcgcggcaagaccgcagcacaatcggcaccgctggggcagtgccatcgccagcgttcaccgcatcatcgtattaaaacgccttttcggaccccgactccggcggaaggtgagaaaggcctaacagccaccggcggccgtcgccagatgacacagctcatgaaactggcgttagcagctatcggtctgttgagcttgctgagctttgccggttgcgcaagcagtccgcggtcacacgatagtctgaaagccctcttcaaaaaggctgatgcggacggcaacggtaaagtgtcccgcgatgaatatcttgactttatgattggccagatgtttgcgaatatggaaaaagacggggatggatatatatcgcaagatgaatttctggcggatgggggctcagccgagacgttccgtaagattaactcttctgggtccggtaaaatcagtctggcggaagcaaaagctagccctttcattcgccaacgattgagcgcgccctttgatgaggcagacaaaaatcattcaggatacgtgacttgggacgagttcgtcgctgcacgcgcgaccgcacttagctatgttcgttaa

SEQ ID NO: 1219 - DNA, 342 bp, Artificial Sequence
  Synthetic Polynucleotide
atgcaccatcatcaccatcatggtggttctggttccaatcccccagggcgctcgatcgaatactggttccgttgtatggatctggacggcgatggtgctctctcaatgtttgagcttgaatatttttatgaagaacagtgcagacgcctggacagtatggccattgaggcgttgccgttcgaggattgcttatgtcaaatgctggacttggttaagcctcagacagaaggagcagtctggggccgtggtccgggccggggtatggcatggggaggtgcgcagggcagcggggcgccggaaggccgcggtactccacgaggttggaggtgctctggcgaatag

SEQ ID NO: 1220 - DNA, 1506 bp, Artificial Sequence
  Synthetic Polynucleotide
atgcaccatcatcaccatcatggtggttctggtcttatgaagaaaatgtatgtctacctcgcctctttaacattgctgattgggccaaccctagcacaagagttcagtgtgatccccaaaaatgcgctgtcgggtgtagctataaaacagatcggaaaccaggcggttaaaaaaggctgtgacggcgattcacctaagtatatgaaagtgacggtcaaaccgagctgctacggtgcaaacttacgcggcggtgggtccaccattgatccgcaaggcggcccggttaaaatggaactgactgttagcaataacggaaatacctttgcctctgacgtgatttttccaacgaagacgacctggccggataactatggtcagagctgctcatggactccggcgcccggtggcgctctggtcggtcactcggtatcctgtagtatcaagaacctcaccaccggcagcgcggtgaatgttaactacacgtgcgactataataaagcctcatggttcctgaacgatacactgtcgtgtacccgaaactccgatcttgcaagtcagggggcgctgaatagctcggtgcggtgcttgtttttctacaattggaaaggcaccggctatgctgccacaagctcttactctaaaaagagtggcattgctaattgcgggctcctggacgcagaagatcttggtcctcagattggtgtaaacatgaaagcgggatcgtcggcaactacagtgaacaaacgtggtacccgtggagaagtcgtcgttgagctggatgatctgtctatcaataaacgcacggtgtataaaaacctgaccaacggtgaatatgaaacctccgggaaaccaagctccgtgagtgtgaagttttttcaagaggtaagcgccgggaattggaaggcgttgtcagttaaacaggaagtctccatgcatgagttcgaacaatgtttaacggtgaagccgagtttcctcggcactaaccaattctgcggcagctactacagcccgctgatgctcttttttgacaatgatctgccgaattttaggggcgttagctcttttcctttacatccagataaagccgtgacgaactggatcgaaccggaatcgaaaggctatttcctggtctatgacaaagacggcgatggtaaaattacatccaacagagagctttttggaaacggcgaacttatcgacaatgggttcgaggcgctcaaggctcacgatgctaataaagatttcgttttggataaaaaagacgctgtattttcaaaattaatgctgtggcgcgatattaatggcaatggtatatccgaaaagaacgagttggtagcactgagttcaaaaggtatctcttctattaatctttattacaaagataacaatatccagtttcaggggcgtgccgaaattaaacagaccggcgactttaccttcgttaagaacggaaaaaagaaaaaaggaattgtccatgacgtttggttctcccccgttcaattttag

SEQ ID NO: 1221 - DNA, 510 bp, Artificial Sequence
  Synthetic Polynucleotide
atgcaccatcatcaccatcatggtggttctggttcgagtaacaaaaagcccatagcaatcgcggtatccacggcccttctgttatcaggagctgcgtttgctagcactcacctgtctcaagggtaccagttgggcgtcgacaccgttattggtgataaaggcgcagagggttcatgtggcggtgataaaggtgcggaaggcaaatgcggagaaggggcctgcggcatggataaaatggacacaaataaggatggaaaaatttcgaaggccgagtatgacgctgcacataaaaacggtgggggcaatttcgcgaaacatgataccaacaaggatggttttatcagcgcggcggaaatgaaagccagccacgaaggcaaatgtggcggggacaaagccgcggaaggtaagtgcggagaagggaaatgtggcggtgataaaccggcggcaatgtcggacaaaaaagcagcagagggcaaatgcggtgaaggaaagtgcggtggcgctatgtaa

SEQ ID NO: 1222 - DNA, 1179 bp, Artificial Sequence
  Synthetic Polynucleotide
atgcaccatcatcaccatcatggtggttctggtgctgaggccgcacgaacgagaatgcgtgcgctcgcggccgggttaactattttgctttcgggctgggcaaccagtggatgggcggtaggtaattctgaatgcctagaatgtcatggcgacgagagcctggtccgtagcgtgtccacaggtatgcgggattcgctgcacgttagtgccgataagtttaaatactcagttcataacataaacggcatcggttgcgtggactgtcacgctgatattaccacgctggactgggattcggatgtcccccatgcagcggaactggccccagtgctatgcgaaagctgtcacgttgaagtaggggaagcatatgcgaatagtgttcataaaaaagctggttctaagggcatcaccattccttgctatgcctgtcacgcgtaccatgatactacaccgcttgcaaaagccaccgtgtccgagcgccagaacagtttctgcctgaaatgtcataatccgaacaattatcatgactggctgccgcaaaaagaaagccactttgccttcgtcgagtgcatcgtttgccacgcgcctgaatcaccgcgccaggtgaacttgaggttttacgacctggtcgaatccaaattcctggatggcgatgtggtgcttcgcacgctcggtaccgatcgcgttaattttccaggattagtagatcgtgatggcgacggagtggtcagcgttgcggagttcgaagactttgtattaatgctgcgtcaacgggacattcgtggcgtctttcatggcgaactggtagctaacataggtccgcaggcccatcaggtgaatcgcggtgaagtaatccgggactgtgctgagtgccatactgtgaccagccccttcttccaaaacgtcaagttggcgtttgatatggatgacggttcgatgctgtccctcgaggccgaacgcgatgtgctgcaaacgtattttgtcgagttaaacgtcctggggtctgcgcgtgttcgcctcctggataaaattggaattgcacttatcgcagggggcgtttcagtggttgctgtgcacctcagcgcgcgtctgttgactgccccgctgcgccgtaaaagacgtgaagaagaggcccagtcaaaggaaaaaaccagagctggcggctcggataatgcgtaa

SEQ ID NO: 1223 - DNA, 1074 bp, Artificial Sequence
  Synthetic Polynucleotide
atgcaccatcatcaccatcatggtggttctggtaagaaaaacgggtaccataaaattttttcgggattagcagtactcctgcttatcgctctgccactgtctttagccgcgatggactccgattattgcctgatgtgtcacggtgatgcggatatgttgggcggttcactggttattgacatggcaacgttcgatacaaccggccatgccgacttgggctgcataacttgtcacgatagcatcaccgaggcgcatcccgatgacgcagtcgcggtgagtcgagccgtctgcctcgattgtcacgacgatctagggagccaatatatgatgacggaacatgctaattacgcgacctgcggtgactgccataaccctcacgaagtgcggtctttgaaagctatggccggctatgatatgaatgaaaaatgtggtcagtgccatatgcaggatgagatggaagaagtacacgcggagtggctgccgcaagcccgtctgcacctggcgaagctcccgtgtattacttgccatacaggctccgaaaactacgaaatcgttctgaacattgtgcagcgccaggaggaaaaattattttccccgttcgttctccctgaatatgaagcactaaaagcagtgagcggagacgccccgatccttagtctgatcgataccaatggagacaattttgtctcgcttgccgagcttcgccgttttaaccaaaatccaaaatacaaaaacctgcgcctggaaggcacgctggtgccgtcggataccagccatgagttgattacccttgactcacgttatgattgcacattctgtcatgtttccggcccgggttcactgcaaacgagctttctggcaattcccggcgctgcgggtggctatcagagagttactgtagagggtggggctgtcttagacgcgctgtatggtacccctgatttctacatggtgggcaccacgcgtagtgcgagtatgaacatcatcgggctgctgattatctgtggtgggttggtgatgccatttggccacggactactacgcttcttaactcgtaagaatcgccagcactga

SEQ ID NO: 1224 - DNA, 1176 bp, Artificial Sequence
  Synthetic Polynucleotide
atgcaccatcatcaccatcatggtggttctggtatgaaagtttattttgataatgcggccacaaccgcaatggacgatcgggtcattgaagctatgcttccattcatgaagactcactttgggaacccctccagcgtacatagtcatggccgtgaggtgcgcaccgcgatcgaaaaatcacgtaaaaaggtggccgaactgttaaacgcttcgccgagcgagatattctttacgtctggaggtacggaagcagataataccgcgctcgtttgctcagtcgaaacacacggcatcacgcatgccatttctagcccgattgagcaccatgcggtgctgcacaccctggaagttttggaaaacaaaggtaaaatcaaactgtcgttgctggacgtggatcaaaacggcaatattgactacagtcagctgactgatctcctgcaaaagaatcctggttccttaatctcccttatgcatgcgaacaatgagattggtaacctgaatgatttgcagaaaattggggacctagctaaagaatttggcgcattctttcattctgataccgtacagacgatgggccattatgtccacgacctgaaaaacttaccggtcgacgcaatcgttgccggaggtcacaaattccatggtccaaagggctctggatttctatacgttaggaaagataagaaaatccatccgttcatccatggcggtgcccaggaacgcaacatgcgaggtggcaccgagaatgtgattgggattattggcatagcgaaagcgttagagctcgcttacgaacacatggctgaacatcaagcccacatccgtagcgtgaaaaaacactttatagaaaaactgaatagcgaaattccgggggttgaatttaacggtatgagcgcggatctggataattcactatatacggtgctgaacgtctcactgcctccaagtgagtcgaaccgcggtatgttgctgttcaacctcgatcttgagggcatcagtgcatccggtgggagcgcgtgttcgtcgggcgctaccgtaggctcccatgtcctgcgtgccattggccatcaggcagaacgcgacagtgtgagattctcttttagccgttttaatactcttgaagaagtagattataccattgagaaactgaaagaactgtacgcagtggaagtgtag

SEQ ID NO: 1225 - DNA, 666 bp, Artificial Sequence
  Synthetic Polynucleotide
atgcaccatcatcaccatcatggtggttctggtcgatccattgttggtactgggcgtgatgtgcagtttatacaaccttgtgctagctggcccatgcgctcgggaggccagggcttcccggcgaccgcagccggtgtaaagttagcgcgtacaccggacctgtttaccgaacgcttcgtcccaagaacgcaaatgatcgccgcggtgctccttggcccgatgttggcaacgatcggtgctagtggggcgagcgcccagaccgcgaccggatctaacgttccacgggcagagtacattgctacgatggatgtcgaatatcgcaaaatggacggcgataaaaatgggaaagtgactcgtgccgagatcgaatcctttgaacgtggtgtcgcgctgggtcaggctcgagcacgcgcccaagccatgtttgtacagctggatgcggaccggaacggccagctctcagcggccgaatttggcaaaatggtttcagggtcgccgcaagtggatggacgcccgctgctgggtaaactggataccaataaggacggcgcagttagcttgattgaacaccgtgccgggaaactggcgtatttcgatcagattgatagtgacaaagatggcgtggtaacagtggctgagatgaaggctgccggtgttatcaaatga

SEQ ID NO: 1226 - DNA, 978 bp, Artificial Sequence
  Synthetic Polynucleotide
atgcaccatcatcaccatcatggtggttctggtggtgcctgccctggatggcacgctatgtgtgaggggcattttgcaccgcgtgcgatcggcgacgatgcgcgcgcccccggcggcaagggtccaacgatgaaaatttctagcgaaaacgcggctttagcacttacccaaactaatccgtccggtgcgagtgccaaacgacgcgaagcggccgagctcgaagcagccaaagcgaaatcaagcgatgctcgtaccatagtggacacagttgaactgacggatgcgaagccggcagcacaggtcagtaggtccgatgcacagtcgagcccgccggtagctcaggcaaatgccggcgcgccagcggaccccatcgcagatattttgaaagctttcggtcaacgctcgaccgatagcggattttcatctgccgccgacgtgaacggtgatggggtaattaacttcgcggacctgaacgcgacgctgaataaacagaataccgaaggcgaagcggagcctccgactggtggcccgctgccagttgaacccgatcctttagctccgaccccggcgtccctcgacgccgatgagggaggggccatcgacgccccaacgggcgcaccggcaagtacaaccgatgaaaaagctgaaggtcccgcggtttttaccgcagatgatgtggatcgtgctctgggtgcctttggcgcatctgagggggacgacgcgttcaactcggcgtatgattttgataatgatggcgtcattaacttcggggaccttaacgaactgttgaaccgtatcggagcgggcgcaaatgcccaacagactctgctagatcaattaaccgaacgatttggcgccagcaatggtgaagagcggttcaacgcgaatctggattttgataacgatggcgtgattaacttcggcgacctgaatactctactggcaaatttggcgcagaacccgggtggtgacgaataa

SEQ ID NO: 1227 - DNA, 423 bp, Artificial Sequence
  Synthetic Polynucleotide
atgcaccatcatcaccatcatggtggttctggtatgccctgtacgatgcgatggcctactgaacgcaacggggctatcagcgtccgtgcatcccggggccgtgagggacaaggtattgcgccgatgctcagtttgatgcttgccatggcggccggcgcagcggaactgccgtcggtagatgcgatgccatcagccctgcgctatccgcaggccaccatgttcttagaaagggaggcttctctgaaggcttgggcagttcgcacctacgacagcaatcgtgatggttggctgacactttatgaagcgcagccggcgatggcggcatttaaagaaatagctgattccgaccgtgatggccggattaccacgatcgaataccgccgtggtattgagtttattacagccagatgggcggcgcaatag

SEQ ID NO: 1228 - DNA, 468 bp, Artificial Sequence
  Synthetic Polynucleotide
atgcaccatcatcaccatcatggtggttctggtaaaagcactttaatgaagaaaacgttgggccttctcgctctggggctgatcgcgacaggagcccaagcaagttgggaccgcgatgaacatcgttattcaggtagggcgtacccgcagtcgcagctattttctgagaaagtagatgctcggcaggaccgacaaaaagcccgcataatggcaggcatgcgtgaaggtcgcctgtcccgtgcggaatttcgccggctgaagcaggaacagcgtgagattcgcgcgatggcccgttatttctacgccgatgggttcattaatccacacgaatttcgtcgcctggaccatgctttagatatcgcgagccacaacattcgagcagaaatgcataaccgccaagcacgttccgcatatggtcacccctctcggttcaatcaggccagacatcgcgcttgccgttatagctaa

SEQ ID NO: 1229 - DNA, 405 bp, Artificial Sequence
  Synthetic Polynucleotide
atgcaccatcatcaccatcatggtggttctggtgcccccttacgcagcaccgggcatcggcttcaaacacgatcttatactatgaatcgtatcgcttttgcagcgctcgttgcggctgccgcagtcgtgtcgaacgccgaggaagcgaagaaaccagaagcgcctggattcccgccgcgcgacaacatgcgtgccgaagcattgaaacagtttgataaagatggcgacggtaaactgtcagatgccgagcgtgaagctatgatggcggcaagacggaatatgggcgacaaaatgcgccaggaacgtgagaagcaattcgataaaaacggcgatggtaagctggacgatgcggaacgcgaagcgatgatggcagcgcgtaaagagatgatagacaagattatgtga

SEQ ID NO: 1230 - DNA, 2064 bp, Artificial Sequence
  Synthetic Polynucleotide
atgcaccatcatcaccatcatggtggttctggtgagaagcgcccctcaatgacgcatcgtcctctccggactattgcttgcatcatagtaagtttagccctgagcgtgtcggcgcaacaggcagaacagccatctttgccggaaaaaccggcggacctgtttcaagccacacgagtttggaacgtccaccttaccttcacgccggaacagtgggcagcgatggagccaaggcaaaccgaacgcgctccgtttggagggcgtaatgatcgtcgcggcccgatggtgttcggtcccggcacctttctggccccggttgtcttaaaagcggcagatgccaaccaggacggtaaactggcgcgtgatgaatttgctactctggccgatcgctggttcggcgagtgggataagcttaaagcagggcagctgaatctcgaacagttgcgcacaggtctggacgcgacccttacgcaatccggcgctgcacttcagcctccggtggcccgtagctttttactgggacaggagggtcaaagaaacggcttgtcaagttctcggggaattgaatttgactatgtacatgcggatctggaatttgaaggtcaagtgattaaagacgttggtgtgcgctacaaaggcaatggcacgttcatgcagtcgcgtggggatctgaaacgttcccttaagatcgacctgaaccagtatgtcaaaggtcagaagctggctgatcagacccagctcaatctgcacactaacgtgaccgatcctagctggatgaatgaggtcatgtcacatcgtctatacagagatgcgggaatcgccgcgccgcgcagcgcctatgcgcgcgtttatgttaccgtgccaggcaaacacgatcggcaatacttaggtctgtacagcctgattgaagatgtcgggaaatccttcgttgaggaacggttcgatacaaaaaagggggcaatttttaaacccgttactccggcgccatttaccgacatgggtgatgattgggcggcgtataaccaggtatatgaccccaaactagatctgagtaagaaagaatcagcacgtataatcgcattctgtaaactcgtcagtcatgcctcggatgctgaatttgccgaaaaagctccggagtacctagacctagatcaattcgcaaggtatatggctgtgacggtgtacctctctaccttagatagcatcctgtcggttggccagaactattacgtatacttgcaccctaagactgaaaaattgcaatttatttcatgggacttagatcattctttcggccaatttggcatgggcgccggccaggacgagcgcgaacagctgtctatccatcgaccatggcgtggggacaatcgcttcttggaacgtgtcttcaaacttgatgcctttaaacagttctattttggtcacctgaaagagttttcgcagaccatttttaaaccggaacgcttccaccagcaagtggatgaaatcgcagcggcgattcgcccggcgattaaggaagaatccgagcagaaactggcccgttttgatacagtagttgcaggaaaaccagcgggaccggaaggtctgatgggctggtttcgcggtcctggtcagagccctaaaccgataaagggctttgtgagtgcgcgtacgcctgcggttatcgaccaactggctggcaccagccagggaatggcactggacggcgggggcttcggcggtcggggaggccggggtggtcctggtggaccaggcggtatgccgtcacccggcgcgtttattgccccggcaatgatgatgtctttagatgcggatcgcaatggtcaacttactcgtgacgagttcacgcaggggttcgccagatggtttgccgcctgggacctgagcaaaaccgggcagcttaccgatgagcaactgcaaatcggtatggctcgagatttagcgccgcgcgatatgcgtggcgggggacgcgatttccgtgacgaccgaggcggtcgagataaccgtcgcggcggaggcgggccgggtggctttggcggcgggtttggtccgccgaggggacagtag

SEQ ID NO: 1231 - DNA, 2517 bp, Artificial Sequence
  Synthetic Polynucleotide
atgcaccatcatcaccatcatggtggttctggtcgtgtgggggtctatttccatcgcattgccccggataagctgctctgggcaccccctatgatggcggaccagccgatatccagtgatacggcttgtccattagcgacccacagctttactaccccggcctggcggtacgcagttgtaacaggcgcgggtcttatgatggctggcgtgttgctgacggccgcttgcctgcgtgcggaggatccacgcgaaacaccgtctcctaccggtagcgttgaccatctgttggatatcacctcagtctggactgtgcgactgaattttacggcagaacaatgggaagcgatggagccggccatgggacccggcttccctggtggcccaccggctggtccgggcgcgtttgggcctccgcgcccgttcggtggtcctccaggcgaacgtggaccagccattgactttggcccggggacctttatcgcgccaattttcatgtctcacggtgatgcaaaccaggacgcaagactgtcggaggaagaatttggggaacttgcccgtcgctggttcgctcagtgggatacgaacgatgccggcctattaaccgccgagggcatccgtgacggactgaatgcgaccatggcgcccccgggcggaccgggtggattcggtggcggtccgcctcgtggtcccgggccggcaatgtcgtttcaagcaccggaaggccgccgaaacggtattgcgggcgtaatgggcctggattttccgtgggttttagcggacctggattttgaaggccaggacttcccgcgcgtgagcgtacgctataaaggtaacggcactttcctccaaagcagggggagtttgaaacgttccctgaaagtagatctaaataagaaacaggctggaagaaaactatgcggtgtctcgactctgaatttccatagcaacgtgacagatggctcgtggatgaatgaggttctgtcataccgattgtttcgcgacgctggtgtgcccgcaccgcggacggcgtatgcgcgcgtgtatcttaccgtgccggggaaatttgatggggagtacgtcgggctgtactccctggttgaaaacgttgacaaaaactttgcagtggatcgtttcggcacgaagaaaggtgccatcttcaaaccagtccctgcccgtttgtttgaagacctcggcgatgactggaaagattatcagcaagcttatgatccgaagacccccgttagtgatgaagaaacgcgccgtgtaatttctttttgtaaactcgtaagtcacgctgacgacgaaagatttgcacgcatgctggattcttacctggatctggatcagttcgcaagatttatggcgattactacctggctgagcaccatggattccctgctggccaccggtcagaatttttatgtgtacctccatccgcaaacgcgtcagttccaattcatcccgtgggacttagatcattcttttggccagttttaccccatcggcacccagcaggatcgcgagaacctttcaatccaccgtccgtgggccggtgaaaaccggttcctggcccgtgttttcgcggtcaagaaatttaaacgcttgtatgaagcccacttgcgcgagtttagcaaaacaatttgccggcctgaacgtattggcaggcaggtagacgaacttgcggcggtgctgcgccctgcggtcggagaggaatcccaagaaaaactcgctcgtttcgatacccttgttgccggggaagccgtcggcgcaatgggctggggtagcggtccaccagtgtcgcccccggctccgagtgcagcgcctggtttcggtccgccccccgcatctggatttggaccgccgccgggcgggtcttttggcccgcccccagggagctttggggccccaccgggctccttcggtccgccaccagggtcctttggacctccccctggctcattcggtccgggctcactggccccgccgccgggttcctttggtccggcgcctggcttatttgggcagccagtcaaaccagtgcgcggcttcgttgaagctcgcgcaaaatcagttgatgatcaattggcaggtcgtgccgaaggaacggttgtcgcaccctttggcggtgggggaccgccgccccaaccgcgacaagcgggcgcaccagcaccggcaggatttggccccggaatgttcttgggtccgccgctgacagcggagctagacgaggatcaggatgggcaggttactcgcgaggagtttgaacaggggttccagcattggtttcatacatgggacacagatgaaaccggggtcctaacggaacagcaattaagggcgggtttaaacgaaatgttactgccccaacctggcgaaactccgtttggacggggctggggcccacctggggctccggcgggaggattcggctttggccctcctggtatgttcccgggtggtttcggcagcggtccgcctggtatgattccccccagtccgccgaccgaacgtgaatga

SEQ ID NO: 1232 - DNA, 351 bp, Artificial Sequence
  Synthetic Polynucleotide
atgcaccatcatcaccatcatggtggttctggtatgaaacaccaccaccaccaccacggtccgggcatttacggtctggactgggataacggcgagaccgaagacctggcgaactatatgcagatcttcgtgaagaccctgaccggtaaaaccattaccctggaagtggaaccgagcgataccatcgagaacgttaaggcgaaaatccaagacaaggaaggcattccgccggatcagcaacgtctgatttttgcgggtaaacagctggaggacggccgtaccctgagcgattacaacatccaaaaggaaagcaccctgcacctggttctgcgtctgcgtggtggctgataa

SEQ ID NO: 1233 - DNA, 744 bp, Artificial Sequence
  Synthetic Polynucleotide
atgcaccatcatcaccatcatggtggttctggtctcctgactgaccgcgccgcgaccggcgctgcaatccgagagggacttagatggttagcggataagacagatcggtcaagtgttgccgtcttccactactcggggcattctaaaaaatggcgtggtgtagaccgcgatggcgacggtgaagtgaccgatgaaggtctgtggcccacggatgatgactttatagtggattcggagttggttgcgctactggacccagtgcgtccttccgcattttggattagcttcgcgacgtgcaacgctgccggctttgcagatccgggcctcgctcaaccgggtcgcgtcctgaccttcagcagtggggaaccgcagaaaagctatgaaaatccgtcttgggggcattccgtttggggctggtttctgattgagcagggcatgagggcgggtttagcagacctggatggatccgggcgtgtcagcgtggaagaagcctggacctgggcgcgcccattggctattgatgccactcgttcgcaacgccacggctctcaggatgccgtaatcgttgacaacctggatggtgaactgaatctcggcatcccgggagctccacctcccgcgtcacgtccggccccggaaccagcgccggcgcccacaccgagtcccgagcagccagcaccgtcaccggaacctgacagagagccggaccgtcatggaggttatttatgtgtgctgtgcggctaa

SEQ ID NO: 1234 - DNA, 1044 bp, Artificial Sequence
  Synthetic Polynucleotide
atgcaccatcatcaccatcatggtggttctggtaagaaaataattgtattattgcttgctctgctgctctcggcatgtgaagcgcaaatcattactgttccggtgtttatctacgataacagcgacgcctatatggcggagttcgaatcaaatatccgactagccgcactgcctatggattatcttattcgctcttttaacagtcagaatagccagattattcaaaacgatcagatcgacccattcatgaacaaagactacccggtcctgatgattaatcccgtggatcgtttgtccgtttatgcgatcatcgaaaaagctaagcagaatgattccacgatcattttctttaaccgggagccgctgcctgaagatctggcgctctacgacaaagtctattacgtgggcgccgatgctgtccagtcggcacaactgcaagcgagcttaatcatggacctgtttggaaacgatccaaaaaatttaaatgagtatgataaaaaccaggatgggattatacaggccgttattctgaagggcgaacagggtcatcaggacgccgaagcccgtaccaaatatgtgatagaaacactgaccgagagtaaataccaaattgaagtactcgacattagctctgcgaattgggacaaagagatcgcacaaacgcagatggaagagctaattccgttgtatggtgataagatcgaaatccttatcagcaacaatgatgctatggcgttgggcgcgattgaaaccctgaaaacctataaatttttcgatgatctgaaccaggacggtgtgatcgatagatcaactgaaccatggttgccggttgtcggtattgatggcctggaagtttcgattgagagtattaaacaagggtatctgtacgggacgataaaaaatgattctgaatccatggctgactgccttgtgcagctcgcagattggctgcttaagggcaaatccctagaaaacttcccgtacacaatcaccgacggaaaatatttgtggattaattaccagaagctgtcgctggaagagtga

SEQ ID NO: 1235 - DNA, 1962 bp, Artificial Sequence
  Synthetic Polynucleotide
atgcaccatcatcaccatcatggtggttctggtcgttggacgatgcggaagatgcgattcaaagcgggtggccgtatgttattggtttccctcgcttgttgcactcttatgctgagcgcaatcgcctgcggggcgcaagccaacggaagtgcaggcgcggacgataatcgccttcctgctgagtgggtatttgatcgccgccgtctgtgggaagcccatattcgtatttctgccgaagcatggcgccgcatgcagccagaacaggcgcgccccgcggcgcgtgggatactgggcaacctgatgcgaggattaacaggtgctgccccggccaccagaccggcgaatgcggagtatgaacgtcgggcacctaaccactttggtatggaatacacctatgtcagaggcgtgttcgaatttaatggcgaggtgcatggtgatgttgggatccgcttcaaaggcgtctcatcgtacacgaccgcccgtcaaagcctgaaacgcccgtataaaattgactttaaccgcctactggatgaccaggaatttcacggtttgcagcagatcaaccttcataataacgcatgtgatccgtcccaaattcgtgaggctctgtcttactgggccttccgtgaagctggtatcccagcgccgcgaactgcgtttgtcctcctgttcctgaccgtggagggcgaacacgatagggtatgcttaggtgtgtatacgcttgtggaggaagttgaccggaggtttttgaaaagccgcttcggtacgaaggatggctttttgattaaacccgaagcgggccaactgccgtaccatggcgacaactggagtcagtatcgcggcttccagccgcgcaccgatgggtcggaagaagaaattcgacgtattatcgaattggcacgtattatccaccgtgaatcgggtgaggcttttcgtgaaaagatcgaccaggctatggatgttgatcagtttctgcaatatgtggcggtcaatggaatgatagcaaatttagattcaatcctggcgattgatcataacttctatctctacgcacccccagatggggcaaaaatcatttggctaccgtgggacatgaatctgacctggggtgcctatcagcgcctgggcggctgggatgagctgatggaaatgtcgattcgcaaaccgtgggcgggtaataaaccgctactggacaaggtactggccgttgacgaatggagaaaagcgtatactgagcacgtgcggcgcctcacacgtacggttttgaacgccgagcgtgttcgcgcggaaatagatgctatggaagtagcggtccgcgacggcgattgccgagcaggcggggccatcatggacggtaaccccccagatgtgagctggaccccttcctggaaacgtccagcctctccgatggtcttcgccgaagggcggtggcaaagcctggaagatcagttggatactccggctgacgccgcggatatcgcctacgtcccgcgtttccgcaccgggggacttcagcggggtagtcgcccctccgtacctgtgccaccggagatggcagatgcggcgtttgcggctattgacgccagtggtgacggcaagttagatggggatgaattgacagaagccgcactgacgctgctattctctagcggtggaggcggcgatcgtgctaccactattcgccaagcagaaattgtgagtgcgctggagaaattaaaactgtctgaactgaggtctgaacccgctcgtggcaggcgcagcccgaggcgtggttcaacaccagcgagcgttgcgggaacaatcctgtacgaggctgaccgtaacctggacggacaactagcgcagccggagctccgcgcaaccatcgcacgcttattgtatgaaaatgatatggatgatgacggtcgtttaaactccatggaatttgccggcggcctgggccggtttctggccggttggtaa

SEQ ID NO: 1236 - DNA, 393 bp, Artificial Sequence
  Synthetic Polynucleotide
atgcaccatcatcaccatcatggtggttctggtaaaaaggcagttctgatggcggctatgttgctcttctttggtgtatcgcaagcctccgcggtcacatatcagtacgacgccaaagggcagctgaccgctgtgatatataacccgggcaaacgtattgattacacttatgatgcggctggcaatcggacgaccttagtgatcagccttgaagcaggagactttgatggttcaggcgccgcggatctggccgacgcagttaccgtactacaagttatttctggtttaaagcccgcacaggcgatggatagtgctggcgatgtggacagagacggaaaaatcggtctgcctgaggtcctgtacattttacaaaaagtggcggggatccgatag

SEQ ID NO: 1237 - DNA, 684 bp, Artificial Sequence
  Synthetic Polynucleotide
atgcaccatcatcaccatcatggtggttctggtattgacgcgatgtgtgctgagcaagatgcaaagaccgcccagcgagtgcaggaatgggatcgggatggggacggtttcataacacttcaagaaggcagcgagggactgcgtactaatttaacccgctttatcgatgaacacctcaaagcggacgtcgatggcgacaacaggctgtctcgcgaagaatacgccttggcagttcctgatagtgaaggcgagcgtcaggcggatgggctgacgaaacgtcagcagattatgtttcggtcggctgactccaacgaagatggttattatagcaaagccgaggcggtagcatcactatcttaccgccaatatcatagttacaaaggtcgcgcgacggcgctgcgcgcccgtgctttcgacttagatggcaatcgtgtgtatgatgaaaccgaatttggactggtttacggtgtaaaactgggcgatccgctgccccgtgagatccgcgaaaagtatttgggcaaagggaaaattgccccaaaccatagctattatggtatgatgatgcgcattgtccacatgccgctcgcggaaatggcaaaaatcgaaagcagagttgacgggttcttaaaggaccttcattccaagcgtaacacggctccgcggaatacagaaggcttgcgctaa

SEQ ID NO: 1238 - DNA, 498 bp, Artificial Sequence
  Synthetic Polynucleotide
atgcaccatcatcaccatcatggtggttctggtgcggtcagccggttccttatcggcggagtggcaagtgccctgctcctgactgggggcttgtttttatggcagggtcactcacaactggctgaggaagtagttcttcccgacccaccgccggcgctgcctgccattccggtggcaggcgcgaatgcccctacgcgtggtccggctcctccggcgctcccggccgcaaaggaagcatctcgcgaggaacgacgctttaaccgtttcgatcgtgatcgcaacgatcgtatatcgcgcgttgagatgatgagctctaggacagcggcgtttcggaaactggacaaagacggtaataacctgctaaccttcgaagaatgggctgtggcgacctccgaacgttttgcgggcgcagatgccgataaatccggtgatttgacgcgcgccgagttcgctaccaccgccccaaagcgagcggcgaaacccaaatgtcgctgctga

SEQ ID NO: 1239 - DNA, 474 bp, Artificial Sequence
  Synthetic Polynucleotide
atgcaccatcatcaccatcatggtggttctggtcggcgtatgttagctggcagcgcggcaaccctcctgcttgtgactggagccgttctgatttggcaagggcgagcggagtcgccggaaatcccagccgcgcctcagccccgcttggcatcagccatgacaccggtaagtctggcgcgtgtcccggacgctccatccgcagatccgaaatctaaggaagagaaacgcttcgcgcgtgcagataaagatgaaaacggtcgcataaccctggccgaattagtggaaccgagacgtaaaacgtacgctaagcttgacttgaatcaggatggcaaactcagctttgaggaatgggcagttaaaacgattgataagtttggtgacgcggacgcggataaaaaccgcgccttaagccctgctgaatatgccaccactgcgcccaaacgaaaagcaaagccggcgtgtgcttgcgggtga

SEQ ID NO: 1240 - DNA, 2826 bp, Artificial Sequence
  Synthetic Polynucleotide
atgcaccatcatcaccatcatggtggttctggtcgcacatcaatttcgagcaagcacaaaccaatccatgcggctgcactgttaatagcggccggattcttgtgggccgcactcggcagtcagacggcgtacggggttaccgctgcccccggtcttcatacttatgagcaacctgacggtacccgaatttcttattacctgcgtggcgatgaacaccggaactggcaggaaacgaaagatggcaccctgattaaaatggacccgcgcaccggatattactgctatgcgaaaaatgtcctgggccatgtatatcgttccaatgcgcgtgtgggtatcgaggggaagccgtcttttagcgtggccggtacgggcgcactcctgagcccggctttctcagcagattcgccagaaagtgcaggggcgatgagcatccagtcagcgccgtccctaagtggttctgtatcggtcccggcgagccaacccgttctggtgttggtcgttaactttaccaatatttcatccatcgcccctgccggctactgggaaaaacgctttttctcggatactgaatccagcgtggacagttattataaagaggtttcgtacggtaaaaccggcatggtgccggttgcggaaacggcgcagacagccaacgatggagtggtaatggtgactttagcccaagctcaccccggtaccgacggctacaccagcgatgtgggctcacaggtcccggacattgttcgcaaagcgctgcaacaggcagatgcagatgtcgattttgctttatatgaccaggacgggaacggcaaaatatccccaatggagctgcatatcgcggtaatcttcgcgggtggcgaagctgctactggcgcatattataagtcgatttgggccaatgcttgggaatatagtagcctgtctgtggatgggaaaacaatttctcactacatcgtcgcgggtgaacgttttggagatagctacgggaacccgagtacgactctcatgaccatgggggtattttgtcatgagttgggtcactctatgggactgccggacctttacgattatggctatgactccgtgggtgtgggtggcttatcgctgatggcgtctggtagctggggttctggctctgggcagcctggagcatccccagttcatccggatgcatggagcaagattgccctgggcttcgtcagtcctgatttaggcctccccggtacggagtatttgctgaatgacacgggatccgctgaatttaacattctgaaaatatccaatccgagcgcgccgggtcaatacttccttctggaaaacagaatgggccgtggatacgacgctgccctcgatgagttctttaacaattcgggcatcgcaatttatcatgtggatgaaaatgttatggattatgccaacgcgaatccctacgcgtttccatacttcaacgataaccgcttccggaaaggagtcgatgttgaagaagctaactttggcattcttggttacggcgagctagactactatggtagcaatcgtagcgaatatatcaatccctctccggcgtcatataaaggctataccttttttgcgctgggggattccggtaaatacgccgcagcctttaaggagagcacgcaaccgggcagccgcttttactctaaccctgtgggggccagcatcgtgccgccgctggtatacgacgctaccacgggtggggattggtacttcgaatcggattcgagtgtaggaatccaggccttagattcgggcattaatttggacatcctagatgttgctcagtatacgatgcgagtccgctataacgcggcatcatataccgtgacactgggagtgaacccagcggccgggggcaccgccactggtggcggctcgtatggccctggcgctgcaataacgttgcaggcagcgccgaagaccgggaacaccttcgcgggttggtgggaaggaagcacactgctaggggcagagaatccgctggtaatggaagctacgaggaatatggaccttactgctgcttttcgtgccaacaactacacaattaaactgtcaggtaatggcgcgacaagcggaaccatgggttccttagcaatgacctacgatgccagcaaaacactgaccactaacgccttcaaaaagacgggttacgcattcttgggttgggccacctcgtctactggtccagtggtttacaaaaactccgcgtctgttaagaatctcaccgctactgccaatggcaccgtcaccctgtatgcgaaatggggagctccggtcgtgagtgctgtctcgagcgggtatacaagtattaaagtctcctgggcgtacgcgggctctgccacctcatataaaatttaccgagccacgtcggcgactggtacgtattccctggtatatacagcaagttcgaccgcacgctcatgggtaaacactgggcgagttaccggtaagacttattattataaagtgtgcccagtagcgggaggcaaaacatatgtcttcagtacgtataagagtgcccgcgcagtgccttcgaccccgaccgttgccctcacaaaaccaagttctacctccatcaaagtgacgtggaatggtatttctggtgcaaccaaatatcaggtataccgctcaatcagcgcgactggcacttactacttggtgtatacggggtcttcatcagctcgtagctggaccaatagctcactgccgaaaggccggacttattactttaaagtacgtgcgttgcatctggtgggttcggtatatgtgtacggtagcttcagttcagtgaagtccctgagcatttga

SEQ ID NO: 1241 - DNA, 648 bp, Artificial Sequence
  Synthetic Polynucleotide
atgcaccatcatcaccatcatggtggttctggtgatactgctgcgaagccgccttctttacccgacacgccaatatttaaagatttgccggcaacaggtgacgccctcttcgatcgtgcggttcgcgtggtctttaaacatgaagggtattacagtaatgacccggatgatccaggcggatataccaaatacggtgtatcgcttcgaaccgccgtgacgattggcgatctggacggtgacggccgtctggatctggacttcgatggtgatggcgacgtcgatgcggccgacctgcgccggatgaccgcattacaggcgctagatgtttataaacgtgctttttggtccccgtatccttacggcggacttcccccgcaaacggcagtgaaattttttgacttatcagtaaacatggggcaccgccaggccgcgcggctggtacaacgcgcgtgtcgtgcttgcggcgcaagagttaccgatgatggtatcgcaggcccggcgactattgccgctatccatagcacatatcagccggcacttctggccgctctgcgcagcgaggctgcgggtttctaccgtttgctggcgagtcagcgccccgcgtctgtgaagtacctcaccggctggctgaaccgtgcctattattaa

SEQ ID NO: 1242 - DNA, 1713 bp, Artificial Sequence
  Synthetic Polynucleotide
atgcaccatcatcaccatcatggtggttctggtatccgattcagtcttcggaataaaatgtcactcatgtccggacatttatttattatatttttgcgcacctcgctgctgttcttttctttcatctatgccagcctagctcagagcagcgaagcgcaagaggcacaccagaactccccccgccaatttattctgtcgattgggatcagctcttttgatagtccattctggaagaaactgaactacgcctataaagacgcggaagatattcatcactttttcgagggccatactaagtacaatcgtctgcttggtcagaaagaagacaaaaaaggtcgtgtcacgcgccgtgaaatcagagatgcattacgcgaattacgttcacgaaacacccatccggacgatacagttctgatttatataagcacgcagggctctgtggagcgcgatcactatggccgtttgaccggttttctggtgacttcggattcccaaccgcagaatattatgaacacggcgctgagcaatgaagaaatcttttcttggttcagatcaatgcgtagtcgcaaaaagattctcatcctggacaccggttacgctcgggagggcaaatcgcgtattcctctacagattgaaaaatcactttccgataagaaagcaagaccgtattttcttccagaatcaacccgcgtagagggaggggccatcctgtccgcggcgagctggggcgaggcggccacagaagacccgttcctgaaaaactctctgtacacccatttcctgttgcagggctttcgcaacgacaagaacggggatggtgttgtatcaattagcgaagcccactgtagtgctgcgcgtcaggtcctccaacttagtgaagcccgccagcatccgactgcaaccatggaactggtggagggacgtcctatcatcgtgtcgggcaatccttctcgtctacataaagctaggctcatctccttatctcaacaaaacgagaaactgcgggttttggtgaatggtaaggaagcaggtacgctagcacgaggcagcctggatctaccggtaggtccattacgagtcagcctgtttgacccggatcagaaaagagaaatcgcaagccgccacgttttcattcgtcccggccgggaatatttggcaggagatattttaggtcgccagcagaacaattcgctggaaatcctgccgatttttcaacgcatacacccaacacaagatacctactcttacactaaagaagcggacatactccatggcctgcgttatcgccactacgagaacgacttcggtattgtggttagcgcgctgtatctgccggaagcctatgaaaaaggaccccgtaatcgtgcctatcgttaccagaccaagcgggggtatgcgtgggatatcggctttggcggtcgcctcccgctgccatcccgccttgctagcttacagaatgcactgatttatacgtcggggttcacccagtcacgcatttttcgtgaggtcggcctgttttctttagaaaagaaaaagaccacagaagatttcccgggtggatttttgcgcgcaggtctgagttcgtcactgccggacagctctttcagtatgtcggctgaagcggagatcgcgctcgtgcgtaacgcgctgacggatagcccttccgccttaattcaggagcgtttgatgataggcctggggtttatatggtga

SEQ ID NO: 1243 - DNA, 447 bp, Artificial Sequence
  Synthetic Polynucleotide
atgcaccatcatcaccatcatggtggttctggtatcgttcgtacactgattgcagccggggcggtcttagctgtggcggccccggctgcgctcgcccagactgctgcggcacctccatcgggaatgtcccttcaacagttccaagcggcaaatggtgataaaatgtttgcccgcttggacgcaaacaaggatggcaaaatatctgccgaggaatttgcggccttccgagaaggcaacgccaaagtagacgcgaaggcgggtaaagcaggcaaacggggtcagcgcatgtttgcgcgtttcgataaagacaaagatgggagtctgtcacgcgcagaagctgatgaggtgttagcgtggaggtttaagcgtatggatgcaaataacgacggcgttctgaccctggaagagctgcaagctaaacgcggtagagctaaagtcggaatctga

SEQ ID NO: 1244 - DNA, 423 bp, Artificial Sequence
  Synthetic Polynucleotide
atgcaccatcatcaccatcatggtggttctggtacaggggcacccgagtacagcaacacgtttgcgggcggagaagataccggcgaagctcgaggtactcggcgtctgagtgccgcgcgcaagcagttccataatcgtcaagaaaccataatgaaactcgcatcgacgctttcagccactgcgttgaccttagctttgattggtgggatcgcctccccaggagcgtttgccgaggtcccgaaagctcctaaagacatcgcagcaatggataccaacaagaatggccgcattgaaaaagatgaatatgttaaagcaatgtctgcggagttcgacaaaaccgcgggtaacaaaggctattgcacatttgaagaggtggccgaagggtggcgccagcgtgtaattgcgctggaacggaatccgtag

SEQ ID NO: 1245 - DNA, 1155 bp, Artificial Sequence
  Synthetic Polynucleotide
atgcaccatcatcaccatcatggtggttctggtttgatcaattattttgacaacgccagcacaacgaaggtggattctcgcgtacttgaggttatgctcccgtacttcaacgaattttatggaaatgcatcgaacaaccatctgttaggcaaaacctccaaactggcgattgatgaagctcgaaaacaagtctcaaaactgataaatgcgaacgaaaatgagattatcttcaccagcggtgccactgaatcgattaactttgcactgaaggggtttatcgagagtaatttcgaaaaaggcaatcacattatcacggtgaaaaccgaacataaagcggttctatctacctgcgagtacctggaagcaaagggtattgaagtcacatatcttgatgtggacaacgatggcctcattagcatcgaggatctgaaaaaagctatacggaatgaaactgtattgatctgtgttatgttcgtgaacaatgagacgggtattattcagcccattaacgaaatcggcctgattgcgaaagacaacaacatcacttttttctccgatgccacccaggcaattgggaagataaaagttgatgtcgaaaccgaaaacatcgacctcctgtgcttttctggtcacaaattaaacgctcctaaaggggtgggcgtcctgtttaagaaaaagaatatccgtctgacgccgctaatgcatgggggaagccaagaaaatggccttcgtgccggtacatacaatactccactgattgtgggtttaggcaaagcgtgtgaaatcgctctgatggacttggactcagataaagattatattgcgaaactaaatagtttcctgattcagcagttgaaagagattaacggttgcgtgataatcggcgatgagaaattcagagtgagtaacattatcgatgttataatcccgggcctgaatagcgacatttttatttccaaagaaaccgattttgcactcagcaatggatcagcctgtacctcgcagatcatagagtcgtcccatgttcttaaagcgatgggattctcagataacgaatgcaaccaaacgatccgtatttctatcagcaaagaaactaccgaaattcaactgaaggaacttgtagactccttaaaggcgaaaattaaatcgatctga

SEQ ID NO: 1246 - DNA, 1290 bp, Artificial Sequence
  Synthetic Polynucleotide
atgcaccatcatcaccatcatggtggttctggtgcgaacactatacaattcaagcgccgtgtcagcggaaatgcaggcgcccccgctgcgctgaaaagtggtgaagttgcccacaacgaggtagataatattctttatgtggggaaaggcgacgatggtgcgggcatcgctacgtcgatcttgccgttagcaggtaaaggcggctttgtggacctctcttcagcccaggcggtggctggaaaaaagacctttgccacagttccagcgtcctcacaggatgcggcagccgccgcggatctggtccggaaaagccaattcgattctgggttaggtacgaaagcaaacaccagccattcgcatgcaatttccgacgtgaccggcctgcaaacggctttggacggcaaagctgctagtagccacacccatgcggcggcacagatttcagattcaactctggccggtcgagcgctgctaaccgcggcagacacagcggcccagcgtacgtcgttggggcttggttctgccgcgctggatgatgcctccgattttgctgcctccgtacacggccataccgttgcagatgtgacggggttacagagcgcgctggacgccaaggcaccgctcgccagtcctgcactgaccggtgcgccgacagcgccgacacccgcaggcaatgataactctacccgcatcgctactacggcgtacgttcagaccgaaattgcggggctggacagcggcgacatgcacaaagcaacttatgacactgataacgatggaaaagtcgatgtcgcggagctggccgatgccgtaccatggaccggtattactgggaagccgagcaccttcgctccttctagccatagccacccgatcagcgaagtgaccaatctgcaaacgacgctcgacgcaaaagccccactggcgtctccggcgctcacgggtaccccgaccgcccctactgctgcgggaggcacaaatacgacccagatcgcaacaaccgcatttgttgcgtcggcagtatcagcattagtgggcggagctcctggtgccttggacactctgaacgaattggctgcggcgttgggggatgatgcgaactttgccactaccattaccaacggcttagcggaaaaactggcgaaagcgtcaaatctggccgatcttaccgacgtggcggcagcacgtagtaaccttggtttggcaacgatggctacgcaagccgcgtcgaatgtcgccattaccggtggcgccataaccggtatcgcattcgattgcggaacattttaa

SEQ ID NO: 1247 - DNA, 405 bp, Artificial Sequence
  Synthetic Polynucleotide
atgcaccatcatcaccatcatggtggttctggtaagacacgtaaacctaaagagctggaaccggacagcatatacgcgtatttggatgtaaataacgatgggattatctctgacgaagaacttgccaaagcaaaagagatcgcggattttgaacacaagcgcgcactccagaaaaacgaagatgctaatgaagaccaaattcggaaaatggcccgattcgcgttttgggttatgttactgtatccagccggcattatgctgtcgtccaacttctgcctcgagagtagcgcatcactgctgagtgatatcgctcccacttactttgtggctattgcgggtctggtcgcggccttctttggagcccaggcgtatgcaaaatctaattccaacagcgaagagtactga

SEQ ID NO: 1248 - DNA, 711 bp, Artificial Sequence
  Synthetic Polynucleotide
atgcaccatcatcaccatcatggtggttctggtccacatctgggcggtgtactcggggtgggacagattttcgttcctacccgtgacggcacaactggtgagcgccggtttcgtgtcatgaacggccgccaatttcgattggcacgcacggattggcgagaaccgatgcgtctgggtttcaagacctctacggctatgatggccgcgctaatggccgcgacccttagtactgcggcattagcagaacgtgctcccatgggtggcatgctgatgaattttgatgcgctggatgccgaccagaacggacaaatcacgaaagaagagctggccgcgcgccacgctgcgcgtttcgcagaagccgacgctgatcaggatgggaaactgtcagcagaagaaatgattgcgatgagggataaaatgcaggctgagcgcaaagcagcccgcgcagccgcgatgatggcggagatggacgcggatcaagacgggtttatctccccggctgaattacccggcagcgccatgatggacaagatgtttggtcgcatggatgataatgccgatggcgctatatcgaaagaagaaatggaggcggtgcaggcgcggatgcaaaaacgtatgggtggcgagaaaggtcatggaaagggacacggcaaagggcatggcagcggcgaacgtggcggtttctggcagtggatgggcggggaccagtga

SEQ ID NO: 1249 - DNA, 774 bp, Artificial Sequence
  Synthetic Polynucleotide
atgcaccatcatcaccatcatggtggttctggtgggccggacccacgccctccgatgaacgcccaccccgcgcttcgtcagttggcaacgaattggccgcggtttggaattatagctcgtcaagagggtgcgcgcactgccaacggctcgcgcgcacgagtgtcccctctgccgttcccatttggtgctgcgagtaccaccccgggcggcacattccgtaggacgaccactatgaataaactgttagtagggctcgcgctggctgccacgacaaccggcgccgcgtgggcagcggatcatgcagccggtcatcagcgtatggccgaaccgcaaacccgtgcgcaggcagaagcccgcgctggacagatgttcgatcgcatggacgcgaacaaggatggtcgggtcgatgctgcggaccgcgctgcgcgtcaagccgcgatgtttgatcgcatcgatgcagaccgtaatggccagatttctcgggaggaatttaccgcgcaccatgccgccatgggccagcgtcgagaaggccaacgggaaggtcagcgcatgggacaccatcgcggtaaacacggcgggcagcatgcgatgatgggcagaggtatgatgggtccagacggcactgcaacccgtgctgagtttacggccgcggctcttgctcgcttcgatcgtatggacgccgacaaaaacgggacagttactatggaagaaaggcgcgcagcacgcgagagcatgcgacaacagcgttcagcagaacgcaacaaggctggctga

SEQ ID NO: 1250 - DNA, 540 bp, Artificial Sequence
  Synthetic Polynucleotide
atgcaccatcatcaccatcatggtggttctggtgtactcctgctttggattaagaacttcactgtgttgacatttctgggaaaaaatctgaccatcttttatcgccacatattctttagcaaagtctggtgtctaaacgcccagtacaatgaactgattttaatcattgcgcatcaaatgatcagactgttgcggtcggttgtgatgcagaaaacccgagtctggttgggtatttttatgctggtgtctgcatcacaattcgcttatgcgaaccatcacgagtccggggacgataaacatggcgaaaagtgcgccggcatggcacacggtgattttagcatcagtggcttagatgctaataaagacggtgcgattacgaaagaggaatacctgacgggcgataaaaacaacaccgaaaagactttcaaacatatcgacgcgaatagcgatggcaatctcgacaaagcggaacagaaagaaattgaggccgtttataaagatatccatgagaaacacaaagctaagaccacacgcatgtaa

SEQ ID NO: 1251 - DNA, 771 bp, Artificial Sequence
  Synthetic Polynucleotide
atgcaccatcatcaccatcatggtggttctggttttttggctaaggcgatacttgagggtgcaaaccagggactgggccaagccttaggcggtctgctgggaggcggggaccagcgtcgagggggtggcgatatcggtggcattgtgggagggattgttaatttcatctcggaagcggctgcggcacaatacactcctgaaccaccgccgacacagcagcattttacgaacgtcgaagccaatgagtcagaagaagtacgccgtttccgccaacagtttgcccagctcgcgggtcccgatatggaagtgggcgccaccgatctcatgaacattctaaacaaagttttaagtaaacacaaagacctgaagtctgatggcttctccctggacacctgtcggagcattgtcagcgtgatggattcggatacgaccggtaaactgggttttgaggaatttaaatatttgtggaataatatcaaaaaatggcaatgcgtgtataaacagtacgacagagatcaatcaggcttcctgggtagtagccagttacgcggagcgctgcaagcagctggctttcagttgaacgagcagctgtatcagatgatcgtccgtaggtacgccgaagaagacggttccatggattttaacaatttcatttcttgcttagttcgtcttgacgcaatgttccgcgcgtttcagtcgctggatcgtgacgcggatgggctgattcaggtaagcatccaggagtggttacagctaaccatgtattcttga

SEQ ID NO: 1252 - DNA, 747 bp, Artificial Sequence
  Synthetic Polynucleotide
atgcaccatcatcaccatcatggtggttctggtttgatgacacggctcctgatcggtggagttattgctgcggcatttgccgcgtcgataccagccattgcacaggtggcgcccggggctgccgcgccgcaaccgggccctgccaaagcggtaaagagtcgcgctgaagtccagtccgcagtggctcgtcgtttcgagcgaatggattctaatcgcgacggttttgtttcacaggcagaagcgcaagccatccacgccaaacgcggcgaaagacgtcagcagcgcgcggagggccgtgtcgatccggcagcaattttcgccaggctggatgcgaacaaagacggttccatcactcgagcggaagccgatgctgcacgtacggcccgcgcggtggcacgcggaaaaccggcgaacgcgcatgcagttgcctttggcaatcttttcgagcgggcggacaagaaccgtgatagcattattacccgcgcagaatttgatgcggcccctccaaaaggcggtatggctgggaaacgtggaggcgctcgccatggtggtaagcacgccggcatgggcgggcgtctgttcaccatgggagacgcgaataaagacggtcgggtgagcttagcggaagcacaacaggcggccctgtcacatttcgatcgtgcagacttaaaccgagatgggcaagtcacgccagatgagaggcggcagagccgccagcagcgacgcgcccaacgccagccggggtga

SEQ ID NO: 1253 - DNA, 483 bp, Artificial Sequence
  Synthetic Polynucleotide
atgcaccatcatcaccatcatggtggttctggtggattaattgtggccccagagcgggcagctggggcgagtaggttgcatctcgtaaccacaagctgccgcccggaaactacgtgggcggttgtcggcgataccctgggtaacatgacgggtcgatcgaccgaaaaggagctttccatgaaaatcgtggccacgctgatagcgattgcactggttagcgctgcgaccctggtgatggccgaacaacctgcaaatccccagggccgtgccgctgcggcagaaaaaatgaaagccgccgacactaacggcgatggacttatctcacgcgcggaggcagcggcgtctctgccgcgcgtcagtaagcacttcgacgaaattgatgccaataaagacggtcagttatcccgtgaagaaatgcgtgcgtttcatgaggctcgcaaagctaaacaccgcgtcgaaggtgaagcagcggctccgaagtaa

SEQ ID NO: 1254 - DNA, 984 bp, Artificial Sequence
  Synthetic Polynucleotide
atgcaccatcatcaccatcatggtggttctggtggaaacaatcgcgaagttccggatgtgttcttattttgccataacttttcctgtctgaatagggtccgttggatgatgcaacgtcttattgcagtaatcgtgtatttcctgatagctttgtgcttttcgggtaacatggcgaaggcccaggagctcgcggccttacctgacaaaattcaggggcactgggcactgccagattgtggcatctacgatgaagcgttgctgttcacacgccatttttatctgaaaagcagttctgacggtctgagcctgcgcccggccggccttgaccggcaggcggaggattacatgattttatcactgtcgggcgctgcggcccccgttcaagtagaaaatgatggtatcctgaccctcggggtcctcgaaagaccgcccgcccgtcgtacgcgcaactggccgcgacagtgggaaaaattaccgcacgatcaaaccgtggaatatactgcatgcacggaggcgccaagcgtcgttccgaagaatatggtgcgtcttatgagatttgtagaccgcctgcgcgacgcttgtgctattaccgattccaaaggctgcgcccgggtggcattcaaattggccgatagtgataacaactctcgcctgacacgtgcggagatcattgcggctaccgaatcactaatgttactggcagaaatgggagttcagactacgctggacgctgtggccgtctctgcggtgaaagagcgtgcaaaaacggaaggtggtaagatcgctgatgatctgatgattcgctatgacgcgaatacctcaggcgatttggattacaacgagattgttgaaaacttcacacctccggcgcttcccgtgatccgtgaaatggccagcaaagcaggcaatctattgccggcattaaaagtggctggtgcggtaatgccacaagaatcgccagcactgcggcgcaaggactactga

SEQ ID NO: 1255 - DNA, 1326 bp, Artificial Sequence
  Synthetic Polynucleotide
atgcaccatcatcaccatcatggtggttctggtggccaccgttcgcgcgcgccaagtcctcggcttagaggggagggagctcgccgtgcaatgggcgattgtagcgaagccccgatagcggtacgtactcgccgctgggccattggtggtctgtcattatttcgtggcctggcgggaggtatcgttattgcaccgatcgggcccggctgcgaatccaaggaacgattggtgggccgcattacactgtctctcgcgctcttaggtatggccagtctggctcaagcacagaccgtccaggtcctgggcgacttgacgtcgggtggcgcgatcgctggagatttcccggccgaccttgttggtggggaggatagccccatgacctgggatttttacacggtggaagtagaagcagggcaactggtgagaatagaagttgaccggaccaccgatagcctggatccggtgtctgtcgcctatttcggagacgtgcagggccagccattgcctccggagggtacttttgtctttgatgcagacctgttcctgccgatggtattcgttgcgtcgggcgatgatgacgacccatccgctaccggttttggtccgtttggcgatcccaattatacgttcacagcggatgcaaccgggatttacacgattatcgtggcctcattcattagcgatccaggagaattaggctatacggtggaagcgaccatcggcgatgccccgacattgcgtctggaacgtttaggcgacactacctttggtgatcgctttaaccgcccttcttcgctcacctcactctcagggactgcgacggacgttgctttcgaggctatcgagattgaggtggtcgaagatggtctgttcacagtgctgggcgaccaaaccaactttggatttctctgggatggttacctacttgtttatgaaggtggtttcgacccctttagcccgctggatggcctgatagcccttaatgatgactactcgggtgcgctgttaccgggtacgggagtgggctatagtggaattgaaaacttgaccctgcgttccggggtgccttacgtaatcgtcacgactggcttcgccaacgacgatgcgggcccgtatcagctgcaagttcttggcaccagcgacgtacgcatttttacgtgctttgcagatatcgatggtgacggccagctgactatttttgatttcttagaatttcagaatcttttcgcggccggggatctgcgagcagactgtgacgaagatggtgaattgaccctctttgattttctgtgcttccaaaacgcctttgcggcagggtgcgaatga

SEQ ID NO: 1256 - DNA, 561 bp, Artificial Sequence
  Synthetic Polynucleotide
atgcaccatcatcaccatcatggtggttctggttcgatttcctgggccccttacatcaatcttgtactcgagaaccgtacagcttttgcggcacggttgctggaaatagcgcaccgcctggggattctacccggctggctgatgatcgttttctatttagaaactgccgcatcaaagacgggtaaaattgaccatagaatccgtaacagctctaccggtgcgacgggcctgattcagtttatgccggtcaccgctacggccctgggaaccagtacatctgcgctccaacagatgagcaatgtggatcaactgacctatgtggagaaatacttaactccgtataaaggccgcatgaaaagtttgaccgatgtttatctggcagtcttctttccagctgcgatcggtaaaccggacaactgggtgcttcaggcccctcgactgtcagcccagacggttgcacgctttaacccgctgtacgatgtaaatcgtgacgggcagattaccgtgggcgaaattaagtcgaaactggtccaattcatcccgccaggatttcagttataa

SEQ ID NO: 1257 - DNA, 546 bp, Artificial Sequence
  Synthetic Polynucleotide
atgcaccatcatcaccatcatggtggttctggtaaatgctggtgtaatctggaacgacgcaagttagccgcaacacccttcaaatccttgaacccatcacgtcagaaagtcgtgatgtttcggccgatcctttttagcgctctcgcgttcgtactaatatcggggtctgcgcaagcccagatgatgggaaggggtcctgatccggacctgaaccgcgatggcaaagttactcaagcggagtttcgcaagagccagaccgacgcactgctggaagctttcgataaaaatcgtgacggccagattaccagagccgaatttaaaccgatggaggatatggctcgtcgctttcgtggtgcgggcggtgcggcacgcgccgccgaagtgtggacgcgtctggatgctaaccgcgatggcgttattacccgtgcggagatcgaagccagtgcagaccgtcgcttcgcggcatctgatgcggatcgtgacggaattttggatcgcgcagaacttactagcttacgtcaatcgaggtccagcggcgggtcctga

SEQ ID NO: 1258 - DNA, 465 bp, Artificial Sequence
  Synthetic Polynucleotide
atgcaccatcatcaccatcatggtggttctggtaaggaactggatcagccagcagcggagctattccgtacttatgaccgaaaccaagatggagccctcgacgaagaagaatttcggcagattaaaagcgctcgctctcgttttgaggaactggatcttgatcgcaatggtcgcatagacctggatgagttaagacaagcggcctcgcgtcgtttccaggcatgtgatgcgaacggcgacgggcgcttggatgccgaagaaatccgcgcatgcggctccggtcgaccggcgcgtggcgagtcacagcccatcacgaaaaaagaacgcaccgtcgacttatttgatcgtcaccaacaggatagggctctgacccgcgcgttgcagggaggtgacgaagagcgtaaaattcctacaaatccgcggtaccaaccgccggttagtcctgtgttcagcgtatttttctaa

SEQ ID NO: 1259 - DNA, 537 bp, Artificial Sequence
  Synthetic Polynucleotide
atgcaccatcatcaccatcatggtggttctggtgaagcgcccgagacggaagaatcaatgaacgcaatccgcttatccctcgccgcgggagctctggcctttggcggtattttgttcgcgcaaactacatcgggccaggatgcaccggcggcacagcaaccagctgccggtgcagcggtcgaggcgccggccggccctgggtatggtccgagggacgggagtggtcctggcgaacggatgcatcgccaccatcacagcggtaaacatggacatcgaggcgggatgatgaagggtgcggatgaaaatagagacggcaaagtgtctcgcgatgagctgctgtcggcccagaaacgtcagcttgcaatgtttgaacgtgctgatgccgataaagacggcaccctgactcgagacgaaatgcgcgctgcccgtgaagcgatgcgtgaggagtaccgtaaacgcaagggtgaaccgcgtcgcgatggggaacgccgaggcccaggggccccgcaagctccagcgggaggcacgcagggttag

SEQ ID NO: 1260 - DNA, 933 bp, Artificial Sequence
  Synthetic Polynucleotide
atgcaccatcatcaccatcatggtggttctggtctggttcgtcttcgacgggatggatttaatttgtcgctgccggtagtccaattaggcctgattgcaatagccctcagcttagactctcgtccaggccgcctggcggctttactgctgttgctggtgtccgggctcttcggttggcagcgctcagtgcgccacgcgcgccagatcctagatactcctaccgccagggttgcgagcgcagctcagggttatgccgaactgcgtggttgtgggcaacccctaggaggcgtgccggtcctgagtccgctgacgggccttccggtcctttggtacagactgcaaacatttcggaaacagcatgacggcaagtggcgtcatgaggcgaccacggaatccgatgcgtcgttcttactggacgatgggtctggtcaatgcgccgtagatcctgaaggtgcagagatgctggttagacgtcgtgatgtgattgaacgtggcgaactgcgccagatccagtggagcttgttacgacacgacccgatttatgtgctgggagaatttgcgaccctgggcagtatcacgccagatttcgacatagccgcccaggtgcgcgagctcttagcgcattggaaaacagatcaccgtgcgcttttgcagcgttttgatcatgatggtaacggcgaaattgatctcgacgagtgggaacacgcacgcgctcaagctcgacatgaggttgaacagcgccatcgcgatctcgatgcagcccctgaagctcacgtggtccgcgctccggcggacggtcgtctgtacctgatttcagacttggaacccgcgcgtttagcaaggcgctatagactgtgggccgcatttcacttggcggtattccttggggccgcggcagcgtccgcctggtttgcgcagaccgtgatcccctga

SEQ ID NO: 1261 - DNA, 2025 bp, Artificial Sequence
  Synthetic Polynucleotide
atgcaccatcatcaccatcatggtggttctggtaaaataagtgcgccgtgtagcgcctccccacgcggcgctgcaccccgtcgagggcgtccttcgtctcgcccgcgtcggccgcccatcttggtacttgcggccgtggcactggcgttagctctcccgacaggaggcgcctttgcgcagggtcgcccagcggatgccgcagaggcagcccggtacgccccggcggtccgttcatatgttgaagctgcgcgcgactatctggctctgggttacccggcggaagcagtgagactggcggatgcagccttagctctgagctatcaatcaagtgatgcccgctacttgagagccgttctagccaaggcgaacggcgaacctgcgcgcttcgtggaggaattactcgctgaagcttttgcggggagcaatttcgagctgtatcgtcgcgacgacgcggaaattctgtatgcctcggtcttggtagatactcgtcgtcctgatcaggctctgaggtttattcaagcgaaaccgcgcgatgcagcaacgctgtacatcgaagcccgagcccgcatggcattgggtgatcgttctggcgcacgctccgcagttgagcgtagcatgagagtggaaccattcgacccgcgagcgctcgtggcgtggcttaaacgtggtgaaccgctggcgagtgaccctgccgatgctgccttagtcgcaaaagcctttgattcccttgacagtctgcgcgatattgaacccggattagtactggcgctagtcccgtatgcgtacgacgcgggcgaggctaggcttctgctccgtgaataccgtgctaacgggggtagcgatccgctggcatctgtgctggcgttagaatatggtttgctctcaccctcgtcggcggttgccgagctgttcagcgctgggtttatcgcctctgaggatcttcggaaactctggcgcctgttgccagatgatggcgcacgcgcggactttctgagggcattcgcttcttatggtggcctggtgtacgatgacgcgaatcgtgatggcgtaccggatgcatatacccgttatgaagctggcctgccggttgcatacgccttggacgccgaccaggatggacgcccagaactgagcgcagcttttaaggcaggcgaaccttccgctgtcgaactggttgcgggtagcgtgaaagctgccattgagtatggccgctggccatttgcgctcgccgtcctgatggcggacgcccggtctagtcgtcgattccagtttggtccggtggcataccgctatgaagcgctgattttcgaacccttcggtgaaggtccgcgtcccgcagccgcaccacgcccggcgcttatccgtccgtcggggctagcgtttccggcggagcgcgccattgcaggcgcggcgtttcgcgtggaggagcgtgctgggtcgaccgttttaaacgcaacgctggacgacggcctgccagttggtctacattggatcgatgccggtggttccaggggatatcggagatatgaagatggccgtccacgtattgaagaaatagatgcagatggcgatggacgcgtagaagcacggaaacgctggccgtctcctggttcaagcgcggctccgctcctggaagtcgataccaatggcgatggactcttcgattaccgcgaaacactggcagcgcctttcctccgttcatgggacctagacggcgatggtgcaccggattttaccatcgaggagctgcccgatgggcgggaaaggcgtggactgagcccgtcctggcgcgatgccccgccactcgccgcgtactatcgcgacggccgtttggttgaactgcgagtgggtggagaaagtaaggggctgatcgccgatgcgggcgggcgagtgcggtggattggccggaaacccttcgatttggggcccaacccgccgcctccgggttcgtatcagcgcgacgggcttcgttacgcgttgatccgcgtcggcgacgagtatctggcagaggtcctcgccgattga

SEQ ID NO: 1262 - DNA, 1155 bp, Artificial Sequence
  Synthetic Polynucleotide
atgcaccatcatcaccatcatggtggttctggtaatgacagtatacgcaacttgttcattgcagctcagaactatacttacctcaattctgccgcggtcagccctctgcccgcgacagccatccggggcgtgatctcacaaatgatggatgtagcgtcgaacggatccatgggttatttaggctggcttaagcacaaagattctgcacgtagcctgctggcgggtatgatgaatgttcgcccggagcaggtagcctttacgcgtaacaccagcgatgggattgctaccattgctaatggcctgccatggcaacagggggacaacatcgttagttttgaaggtgaatttccggccaatttctacccgtggcgaaggattcgcgatgaatatggcgtcgagctacgtctgtgtcccgaacgtgacggccgcattgatctggacgaattttgcgcgatgatcgatcataggacgaaagtggtggcaatttccgctgttcagtacgccagcggtttcaaagcggatcttgagcgcatcggacgtgcggcaagagctgtggatgcactgttcgtagtggacgtcatccaaggtttaggagccatggcgtttgacctgccggcgcagtatgtggatgcggcatcgggcgcctcgcataaatggttgtgcgcgccagaaggttgtggctttttgtatttatcagatcgcgcgcgggagcgtgtaaagcctaccttggttgggtggattagtgttgaaacgccttgggatttcgtggaccgcgaacagccgtggcgtagcacagcactggcttgggagtctggcactggcacctcaagcctgttttacggtttagaacaatccctaaaactcctgaccgatacaggactcgacaacatcgaaaattatgtcaacagcctggcagatcagctgtgcgatggtcttggtggcaaaaattacgaaataatttcgagtcgcgccccgggcgagaagaccagtatcgtctgcattcgccaccggaacgggcatacctccagcgagatagcctcgacgctcgaaaaacaaaaaatcattgtgtcaccgcgtggtgaccgactgcgcattgcagcccacttctacaacaattccgaagacatcgatagactgttggaagcgctgccctag

SEQ ID NO: 1263 - DNA, 933 bp, Artificial Sequence
  Synthetic Polynucleotide
atgcaccatcatcaccatcatggtggttctggtcttgttcgcctccgtcagaggcggttggaaacagtcttaccactggtacaattcgcggccatcgctgtggcaattcacgcggacactggttgggggtccgtggccgcactggctgttctgctagcgaccggattttttggctggatgcgcgcgatacgtcatgcccgcctgattcatgatacccccacgtctcgtatcgctagtgcagcacagggctacgtggagctgcgcggtcgtgcgagagccctgggcggtactcctttgttatcaccggtcaatgggctcccggtactgtggtatcgcgtggtgaccgaaagaaagcgatcggatggaaaatggtatcgtgttagcacggccgagagcgacacctccttccttttggaagatggctcgggtagttgcgcggttgacccggaaggcgcggaagtcatggtggggcgttgtgatgtaaccacgcgcggtgatactcgttacacccaacacgccttaattggcaacgacacagtgtatgttctgggtgattttgcgacgctgggctcaatcgatcccgacttcaacgatcgcgaacaggtccgagagctgctggcgagctggaaaaaagaccatccgcgtctcctagaacgctttgatctggacggaaatggggagctggatctgcaagaatgggaactagcccggcagcaggctcgacgcgaagtagaacgtcgccgcgacgaggcgatggcagcgccagaagcgcacattgtccgtcggccgacggatggacggttatacctcatttctgacttcgatcctgagcgtatcgcacgccggtatcgctggctggcattattttacatagtgctctttttggctgcgatcgccggcctagcttggttcagccaagtgggtatcatttaa

SEQ ID NO: 1264 - DNA, 441 bp, Artificial Sequence
  Synthetic Polynucleotide
atgcaccatcatcaccatcatggtggttctggtttctggtggcaggggcgtgcacaagtcgaaagtactgccccaccgcctcccgagccggaagctgcggcgccggatcccggtgttctcccgatggccgacccaggcacactgaccggaccggctcctccagaggtatcagaactgtctcgcgaagaattgcggttttttcgctatgatcgtaacagagatcgcgtgattacccgcgacgagatgctgtccacgcgtacggatggcttccgcgcattagacgtggatggtaataacttactgaccttcgaagagtgggcggttaccactgtcgaacggtttgaaaaagccgatggcaatggtgacggccgacttacgccgcgtgaatttgcgacgaccgcacctaagccggctgcgaaaaaaccggcctgcaaatgttga

SEQ ID NO: 1265 - DNA, 615 bp, Artificial Sequence
  Synthetic Polynucleotide
atgcaccatcatcaccatcatggtggttctggtatcagaacagcggcttttgcactactggccctgactttcgcggttccaacgtcggtagtgtctgtccgggccgctcctcccgcgccgccggcaaccgcggaaaccccgccaactgccgcggttgggcgttttgatcgcttcgtggcaagctccggcccgacctgccaacgtgaggcctcaggtcgctgtgtcgacttgggattagcttttgcagatcgcgacggcgatggtcgactgagtgtggatgaacttgacgttgtgaggcgtgagctcaaagcttggctggcgtggaagggtccgaaactcacggcagccgaacgcaccggcgctagcctgggggtatggctagtagatacggcgggccttcccgccttattcgattcgtttgacgcggacgcggatggacgcgtgacacggggtgaattactggcagatgttcgactggatcaccgtcctctgggcgacgtcttgcttgacccgcaggcagttgatcgctcagcggtggccagccgtgtcggtaaactggcgccattcctgcaagggtttttcggcatgggagccagcgccgcaccggctcgctag

SEQ ID NO: 1266 - DNA, 534 bp, Artificial Sequence
  Synthetic Polynucleotide
atgcaccatcatcaccatcatggtggttctggtccggcctcagacggtgcagctcgcaaacgtaaggtcgaggcgatgaggaatcacctgatccctggattgcgtgcgcttatacccgtattagccctggggctaggcctgggcgcggtgagcggtgctgttgccgcaggcgatgaagtgcggacaggtgcggcccgagctgaacgtgcgttcgatcgcattgatgcagacggagatggcatgctgtcccgcgctgagattgaacgtgcgcgcgcagcaagactcgcccgtctggatactgacggtgatggggcggttaccgaagcggaaatgcgggccgcagcagaggcgcgcgcggctcgccgtgtggccaaaagatttgcccgcttggacgcaaacggcgatggacgtatcgacgcgggcgaaatggctgcgcggggtgcggcccgctttgagcgtctggatgccgacggtgatggcatggtcagtcgtgacgaaatgcgcgcagcgcatccgcggcgtgcacgcgaatga

SEQ ID NO: 1267 - DNA, 705 bp, Artificial Sequence
  Synthetic Polynucleotide
atgcaccatcatcaccatcatggtggttctggtcatatccacattcgcttgggaaccctgacggtcgcattaggtcttgcgatggccggctcggtgatagctgccccccagaacgcgccagcaccggcggagcgggggcatggtgccatgcaccgaactcatgcgaatctggatgccaaccaagacggcgtaattgatcgcagcgaagctgcggcccacccgcgtatggcagcaatgttcgaccgtctcgataaaaatggagatggccagctggacgccggtgaacgtcctggtaagcatggcgggaaaggcaaaggtggccgcggagggcacggcatgcatggtgctggcgcgatggattgggctgttaggctggatacagacggggatggtcgtatctctaaattggaagcggcccagagtcgcatggcagagcgttttgacgaaattgacctgaaccgcgatgggtacctcgtggcgtccgaagtccgggcacacgcggcgcaacgacggtcagagatggttgccagacgccagcaagctatggaagcaaagtttaccgcggcagatacgaatgccgatggacgcctggatcgtgccgaagtggagagcgctatgccgcatatcgcgaaagtgttcgcatttctggacgaagatcgtgacggctttttaacccgcgcagatattgccccggcgcgaagataa

SEQ ID NO: 1268 - DNA, 372 bp, Artificial Sequence
  Synthetic Polynucleotide
atgcaccatcatcaccatcatggtggttctggtccggcggagtgtcgccctcgacggagagcccttcccgcagtagtcctagctactttgttagcgggaccggccggtggcagcgactacttctcagtggttgatctcgatggggacggccgcatttccctggcagaatttctggaacgtatgggttatgcgtttggccaaatggatctggatgggaatgatgtgctggagccacatgaacagcacgttccgaacgcgccacgtatcacacgcgccgaacatgaagctcgtttcaccgcacagtttcgccgtcaagacggtaacggagacggctatctgagtcgtgccgagttcttggcaccgccgcgctaa

SEQ ID NO: 1269 - DNA, 1314 bp, Artificial Sequence
  Synthetic Polynucleotide
atgcaccatcatcaccatcatggtggttctggtcagcacgatacatcgaagcgcctttttcaagaagccctgcaattgattccgggtggggttaatagtcccgtgcgggcgtgtcgcgctgtaggcaccgagcctttattcatcgaacgagcagaaggatgccatatatacgacgcggatggtaacggctatattgactatgtcggctcctgggggccgatgatcctgggtcatcgtcacccagctgtgattgaggccctcactcatacgctggcacagggcaccagctacggcgcaccgacggcgctggaagttgaactagcccgcctggtcaccgcggcggtgccgtctgtcgagatggtgcgtatggtaaacagcggtacggaagctacaatgtcagccatcaggttagcccgtggtgtgactggtcgcgataccattgttaaatttgacgggtgctatcatggccacgccgattccctcctcgtcgatgcgggcagcggagtggccaccctggcaattgcaggcagccctggtgttccagcggatttcgtgaaacacaccctgtcgatcccctacaatgacgttgctgcggtagaaactgttatggcagagcgcggtgatggcgtagccgcgatcattgtggaaccggtggctggtaacatgggattggtcccgccactggagggctttttgccagcgcttcgtcgtctgtgtgaccagcatggcgcgctgctaattttcgatgaagtgatgacgggctttagagttgcccacgggggtgcgcagtcggtttatggggtcaccccggaccttacatgctttggcaaaatcattggagggggtctgcccgtaggcgcatacggcggacgccgtgccatgatggagcaagtcgcgccgcgtggaaacgtgtatcaggctggtaccctaagtggaaatccgctggccatggcagctggcgttgcgactttaaatcagatcgcgcgccccggcttctacgaagccctggatcgacaaggtgcgaagttaattacgggcctgcgggatgcggctgctgctgccggggtacctgtgacgaccgctcgggtgggaggtatgctgggactcttctttactgaaggtccggtgcataactttgcggacgcaaaacgttctgacctcgaaaggttttcagcgtattatcgcggtatgctcgcagctggcatatatttagccccgtcacagtttgaagcattctttctgtctgcggcccatgatgacgccgccatagataaaacgctgcaagcagccgataccgttttccgtggcctttaa

SEQ ID NO: 1270 - DNA, 1314 bp, Artificial Sequence
  Synthetic Polynucleotide
atgcaccatcatcaccatcatggtggttctggtactcacgaacaatcggccagccttttctcagcggctaaacaggtcatcccaggcggggtaaattcccccgttcgtgcatttaagtctgtgggatgtgatcctatttttatatctcgagcggagggtagccgcattttcgacgtggatggtaacggctacatcgactatgttggctcatgggggccgatgattctgggtcattgccatccgcaggtcgtggcagccatacagcaaaccgcggcgaacggtgctagttttggagccccgacgccgctggaaatcgaactcgcagagatggtttgcgcggcctatccaaatattgaaaaagtaagaatggtcagcagtggtacagaggcgaccatgtcggcaattcgcctagccaggggctacacgggacgcgataaaatcctgaagttcgatggctgttatcacggccatgcggattccttgttagtgaaagctggtagcggtgctgcgacctacggcgttcctacttccccgggcgtgccggctgacctggcgcagcacaccctgacggccacttataacgatttggccgaagttcaggcactagaagcggcaaacccagggcaaatcgcttgcattatcatagaacccattgcaggaaatatgggttgcgtcgccccccggccgggctttctggaaggcttacgggagctttgttcggccaaagggattctgctcatcatcgacgaagtgatgaccgggtttcgtgttgcatatggaggtgcgcaggaacgtttcggtgtacgtggggatttggtgtgtctgggcaaaattatcgggggcggcttgccggtcggtgctttcggcggcaagcgtgagattatggatatgctgagccctgtcggcggtgtgtatcaggctggtaccctgagtggaaatcctctcgcgatgagcgccggcattgcaacactgaaactgcttcaacagccgggtttttacgaagaaatcgagaaaaaatccgcgtacttatgcgctggcctgattgaggcggccaaagaagccccgtttgccacgtgcctgcaacgcgttggagggatgttctgctcattttttacggaaggtccagtatattcgttcgcagacgcgcaaaagtctgatacagcggcctttggccgcttcttccgtgcgatgttggaagaaggtattaacctcgcaccgtctcagtttgaagcaggattcatgtcgattgcgcatagccaggacgatcttgatcgcaccatcgaagccgctcgacgtagcttccgtgctttataa

SEQ ID NO: 1271 - DNA, 1536 bp, Artificial Sequence
  Synthetic Polynucleotide
atgcaccatcatcaccatcatggtggttctggtattgcaggaagcaccgaccaaggggaacacaatgagtaccgccatggcagtctctcccgattgggtcgtcgtcgccccgatttatggcgggtctgcctgcaacgtcctggcgcgccggctgccagacgcgaacagggtgtggttgaacatcgtcgcgcggcccaggccgcaccacgcagaacggcgcaggcaggccgtgatctgcaagctgtacaggcggtgcgtgctataaacccggcagggggtgacaggggcgcgctgccgcgcgccggtcgaccaagagaggcaggacaccgccgcgccaggccgggcagacgtgctgctgcaagaagaccgggtgcggatcttcggggccgtcgcggcctgtcacgggcggaaggtcagcgtgcgctccctgccgccccggacgcgcatcacaggacacgcgagcagcatcgacgcccgccaagggccctacaacgcgttggtcagcaccaacagcgtgcgcgtcgtccggtatcgcggccccatccgggtccgcccgtgcgcctgcgcaccgcatctgcgcctagggtccgtgtcggccgtgaaggccgacgtcgctcagcccgcactcttcagcatctgatgtttggggcgcgcgcacagatcgggttcgctggagcattggccctcgaagcgatggcggtgtttgcgggtctgcgtatggaaagcgcaatgtcggttacggccgggctggctggcgcttctagcgtcggcttgattgcgtggctgatggctttacgccgtcgccgcagcatcaccgatacccctacttcccgtattgcgacggcagcccaaggcttcgtggagctgcaagggagtggtcgtctatttggtgaacagcccttactgagcccgttgaccggccttccgtgtctgtggtatcgcttcgttgtggaagaacgtgatcgcgataacaagtggcggacagtacaaaccggtatctcggatgtttcttttattttagacgatggcagcggcgaagcgctcgtggacccagaaggtgctgaggttatcacgcgtcatcgtgagcgctggcagcgcgataatcagcgttataccgaatggaaactaattgccggagatgacgtctacgcgctgggatcattccgaaccattaacggccacagcgaggcgctttccgcttcacgcgatacaggtgaattgctggctgagtggaaaagggacaccccaactctgttaaaacgttttgacctggacggagacggggaaatcgatatgcgcgaatgggccctggcgcgtgctgaggcacaacgggaagttggccagcgtcaccgcgagattagagcacgcgcggatacgcatctgttagggcgtccgactgatggtcgtccctatctcctggcgaatattgatccagtgcgcctagctaaccgttacctgtggtgggcctgggtacacgttgcggtagcaatcacggcgatatccagtattccgtgggcttggagtcgattctcttaa

SEQ ID NO: 1272 - DNA, 1533 bp, Artificial Sequence
  Synthetic Polynucleotide
atgcaccatcatcaccatcatggtggttctggtgattcaatgtatctggccaaaatctttcgtttcatgcaccctcatcgcttggtggtcgttctcggaatttgcatattatttgcttccactgcaaatgggcagggtaacgaccccgcgctgagtcggcatgattggcttggcgtatgtggtcgtctgctgttcgacccagatgcgtggtacaacgagcgctttggcgcatctcttgactcggatggagaatggttggtgattggcaatccgaacgatgataccgcctgcccgtttgacccgatctgtacagcgggtagcgcgtatattttcagacgagaaaatagcggcacctactttctgtggcaaaagatcgttcctgatgacatccgccgtttagattcgatggggaggttcgtagctattcgcggtagtacggccatggtcgaacgtggcggggaggatatcggtggcggcattggagcaggagaaattctgatttatgctctgcgtgatgaccagtgggaactgacggacagcgtggtttctggcgatgggcgccagtcttttggtttcggtatttttaaatggaacggcaattacctggcgatcaacaccggctatctcgattcagccggtcgcttcggtgatgaggcaatcgaaatcttccgtaatatcgaaggggtgtggacctaccaagactccgtcagcgatccgctaggtcgaccacgcgccgactggattctggacttagctatactcccggatggcacactcgcggtggcagaccactttgatgatacgcgttcattgaacgctggtattgttagggtgtttgagcccgtcgatggccgctgggtactgacgcaggaattactggccccagatgggcaaccgttctatggtataggcctcgacgcggatgcgggacgtattgcagtgggccatgccgcggggctggttgatggccctaccgggccggtggttggtggccgggtcgacatttatgagcgtggcccggatcagtggcaacggacccacgccatcggcctgcgtgaacctatgtcgggggacgcgctaggatggaacgtagaattggacggggatcggttactagccatcgcaagcgaccgcccaaacccgactgcgagcctgccggatggcgcctgggctatctttgactttgatggtagttcctggcgccagactcttctggctagcactcccccgtggtctttgagttcgacctctattgcgattgagctcgatggtcctacaaccttcataggccattcccagtggtcgccgcgcattggacttgatcgtgtaggggcagtagccgtgtacgatattgcctgcctgtcctgccaagcggatcttgatcacgatggtgtgctgacgattttcgactatctgaccttccagaccgcctttggtacgggtgatccactcgctgactttgatggagacggcgaattgaccctgtttgattttcaggcgttccagaccgcgtttgggcagggctgtccataa

SEQ ID NO: 1273 - DNA, 480 bp, Artificial Sequence
  Synthetic Polynucleotide
atgcaccatcatcaccatcatggtggttctggtaatgagaacgccgacgattttccaacgattgatttcaaccgtccgctcgtgccttatcgggaagttttttgtgggctggctcttggctgcgcggaatacgtaggaatggtcaagtctgcgcgcaatactaacacccagctacatatcataaaagtgtcgccggaaccgggtgagcactcccccaaagccttcttactggttgatgtatgcggccgagaaatctataccgcagaccgtgtgattgtcaataaacccccggaatttgtaatccatgagttcgtggttgtcgttgataaggatcaagacggcacaattagcgtcaggacgaccaacaccggtcgcattgcggatgcagtggccacggtgaaattgaaagtatacgaaactggcgaaattgattttctggggtcagaagtttttgctccaaagcttgactggggcagctaa

SEQ ID NO: 1274 - DNA, 738 bp, Artificial Sequence
  Synthetic Polynucleotide
atgcaccatcatcaccatcatggtggttctggtaccgcacttacggaaggggcaaaactgtttgagaaagagataccgtatataaccgaactggaaggcgacgtagaagggatgaaatttataattaaaggcgaggggaccggggacgcgaccacggggaccattaaagcgaaatacatatgcactacgggcgacctgccggtaccgtgggcaaccctggtgagcaccctgagctacggggtccagtgtttcgccaagtacccgagccacataaaggatttctttaagagcgccatgccggaagggtatacccaagagcgtaccataagcttcgaaggcgacggcgtgtacaagacgcgtgctatggtcacctacgaacgcgggtctatatacaatcgtgtaacgctgactggggagaactttaagaaagacgggcacattctgcgtaagaacgtcgcattccaatgcccgccaagcattctgtatattctgcctgacaccgtcaacaatggcatacgcgtcgagttcaaccaggcgtacgatattgaaggggtgaccgaaaaactggtcaccaaatgcagccaaatgaatcgtccgcttgcgggcagtgcggcagtgcatataccgcgttatcatcacattacctaccacaccaaactgagcaaagaccgcgacgagcgccgtgatcacatgtgtctggttgaggtagtgaaagcggtcgatctggacacgtatcag

SEQ ID NO: 1275 - protein, 13 aa, Artificial Sequence
  Synthetic polypeptide
  SITE (1)..(1): X may be D or K
  SITE (2)..(2): X may be A, D, E, F, G, H, I, K, L, P, Q, R, S, T, V, or Y
  SITE (3)..(3): X may be D, E, N, Q, S, or T
  SITE (4)..(4): X may be A, D, E, G, H, K, L, N, Q, R, S, or T
  SITE (5)..(5): X may be D, N, S, or T
  SITE (6)..(6): X may be A, E, G, K, N, Q, R, or S
  SITE (7)..(7): X may be A, D, E, F, G, H, I, K, L, M, N, Q, R, S, T, V, or Y
  SITE (8)..(8): X may be A, F, I, L, M, or V
  SITE (9)..(9): X may be A, D, E, G, L, N, Q, S, T, or V
  SITE (10)..(10): X may be A, D, E, F, G, H, I, K, L, M, N, P, Q, R, S, T, V, or Y
  SITE (11)..(11): X may be A, D, E, F, G, I, K, L, M, N, Q, R, S, T, V, or Y
  SITE (12)..(12): X may be A, D, E, G, I, K, L, Q, R, S, T, or V
  SITE (13)..(13): X may be absent or X may be A, E, F, G, H, I, L, M, Q, R, S, T, V, W, or Y
XXXXXXXXXXXXX

SEQ ID NO: 1276 - protein, 13 aa, Artificial Sequence
  Synthetic polypeptide
  SITE (1)..(1): D may be absent
  SITE (2)..(2): X may be A, D, F, G, I, K, L, P, Q, R, S, T, V, or Y
  SITE (3)..(3): X may be D, N, Q, or S
  SITE (4)..(4): X may be A, D, G, H, K, N, Q, R, or S
  SITE (5)..(5): X may be D, N, or S
  SITE (6)..(6): X may be A, E, G, K, N, Q, or R
  SITE (7)..(7): X may be A, D, E, F, H, I, K, L, M, N, Q, R, S, T, V, or Y
  SITE (8)..(8): X may be A, F, I, L, or V
  SITE (9)..(9): X may be D, E, G, N, S, T, or V
  SITE (10)..(10): X may be A, D, E, F, G, H, I, K, L, M, N, P, Q, R, S, T, V, or Y
  SITE (11)..(11): X may be A, D, E, F, G, I, K, L, N, Q, R, S, T, V, or Y
  SITE (12)..(12): X may be A, D, E, G, L, Q, R, S, T, or V
  SITE (13)..(13): X may be absent or X may be A, E, F, G, H, I, L, M, Q, R, S, V, W, or Y
DXXXXXXXXXXXX

SEQ ID NO: 1277 - protein, 13 aa, Artificial Sequence
  Synthetic polypeptide
  SITE (1)..(1): D may be absent
  SITE (2)..(2): X may be A, D, F, G, I, K, L, Q, R, S, T, V, or Y
  SITE (3)..(3): X may be D, N, Q, or S
  SITE (4)..(4): X may be A, D, G, H, K, N, Q, R, or S
  SITE (5)..(5): X may be D, N, or S
  SITE (6)..(6): X may be A, E, G, K, N, Q, or R
  SITE (7)..(7): X may be A, D, E, F, H, I, K, L, M, N, Q, R, S, T, V, or Y
  SITE (8)..(8): X may be A, F, I, L, or V
  SITE (9)..(9): X may be D, E, G, N, S, T, or V
  SITE (10)..(10): X may be A, D, E, F, G, H, I, K, L, M, N, P, Q, R, S, T, V, or Y
  SITE (11)..(11): X may be A, D, E, F, G, I, K, L, N, Q, R, S, T, V, or Y
  SITE (12)..(12): X may be A, D, E, G, L, Q, R, S, T, or V
  SITE (13)..(13): X may be absent or X may be A, E, F, G, H, I, L, M, Q, R, S, V, W, or Y
DXXXXXXXXXXXX

1. A method of recovering a rare earth element (REE) from a sample comprising: introducing an REE-binding protein to the sample, wherein the REE-binding protein comprises an EF-hand domain, and recovering the REE from the sample.

2. The method of claim 1, further comprising purifying an REE from the sample.

3. The method of claim 1 or 2, wherein the EF-hand domain comprises the sequence:
X₁X₂X₃X₄X₅X₆X₇X₈X₉X₁₀X₁₁X₁₂ (SEQ ID NO: 1275),
wherein X denotes any amino acid;
wherein X₁ is D or K;
wherein X₂ is A, D, E, F, G, H, I, K, L, P, Q, R, S, T, V, or Y;
wherein X₃ is D, E, N, Q, S, or T;
wherein X₄ is A, D, E, G, H, K, L, N, Q, R, S, or T;
wherein X₅ is D, N, S, or T;
wherein X₆ is A, E, G, K, N, Q, R, or S;
wherein X₇ is A, D, E, F, G, H, I, K, L, M, N, Q, R, S, T, V, or Y;
wherein X₈ is A, F, I, L, M, or V;
wherein X₉ is A, D, E, G, L, N, Q, S, T, or V;
wherein X₁₀ is A, D, E, F, G, H, I, K, L, M, N, P, Q, R, S, T, V, or Y;
wherein X₁₁ is A, D, E, F, G, I, K, L, M, N, Q, R, S, T, V, or Y; and
wherein X₁₂ is A, D, E, G, I, K, L, Q, R, S, T, or V.

4. The method of claim 3, wherein the EF-hand domain additionally comprises X₁₃,
wherein X₁₃ is A, E, F, G, H, I, L, M, Q, R, S, T, V, W, or Y.

5. The method of claim 1 or 2, wherein the EF-hand domain comprises the sequence:
DX₁X₂X₃X₄X₅X₆X₇X₈X₉X₁₀X₁₁ (SEQ ID NO: 1276),
wherein X₁ is A, D, F, G, I, K, L, P, Q, R, S, T, V, or Y;
wherein X₂ is D, N, Q, or S;
wherein X₃ is A, D, G, H, K, N, Q, R, or S;
wherein X₄ is D, N, or S;
wherein X₅ is A, E, G, K, N, Q, or R;
wherein X₆ is A, D, E, F, H, I, K, L, M, N, Q, R, S, T, V, or Y;
wherein X₇ is A, F, I, L, or V;
wherein X₈ is D, E, G, N, S, T, or V;
wherein X₉ is A, D, E, F, G, H, I, K, L, M, N, P, Q, R, S, T, V, or Y;
wherein X₁₀ is A, D, E, F, G, I, K, L, N, Q, R, S, T, V, or Y; and
wherein X₁₁ is A, D, E, G, L, Q, R, S, T, or V.

6. The method of claim 5, wherein the EF-hand domain additionally comprises X₁₂,
wherein X₁₂ is A, E, F, G, H, I, L, M, Q, R, S, V, W, or Y.

7. The method of claim 1 or 2, wherein the EF-hand domain comprises the sequence:
DX₁X₂X₃X₄X₅X₆X₇X₈X₉X₁₀X₁₁ (SEQ ID NO: 1277),
wherein X₁ is A, D, F, G, I, K, L, Q, R, S, T, V, or Y;
wherein X₂ is D, N, Q, or S;
wherein X₃ is A, D, G, H, K, N, Q, R, or S;
wherein X₄ is D, N, or S;
wherein X₅ is A, E, G, K, N, Q, or R;
wherein X₆ is A, D, E, F, H, I, K, L, M, N, Q, R, S, T, V, or Y;
wherein X₇ is A, F, I, L, or V;
wherein X₈ is D, E, G, N, S, T, or V;
wherein X₉ is A, D, E, F, G, H, I, K, L, M, N, P, Q, R, S, T, V, or Y;
wherein X₁₀ is A, D, E, F, G, I, K, L, N, Q, R, S, T, V, or Y; and
wherein X₁₁ is A, D, E, G, L, Q, R, S, T, or V.

8. The method of claim 7, wherein the EF-hand domain additionally comprises X₁₂,
wherein X₁₂ is A, E, F, G, H, I, L, M, Q, R, S, V, W, or Y.

9. The method of any one of claims 1-8, wherein the EF-hand domain comprises no more than two amino acid substitutions relative to an EF-hand domain sequence in Table 2, corresponding to SEQ ID NOS: 300-977.

10. The method of claim 9, wherein the EF-hand domain comprises a sequence selected from the EF-hand domain sequences in Table 2, corresponding to SEQ ID NOS: 300-977.

11. The method of claim 10, wherein the EF-hand domain comprises a sequence selected from SEQ ID NOs: 304-715.

12. The method of claim 11, wherein the EF-hand domain comprises a sequence selected from SEQ ID NOs: 304-473.

13. The method of any one of claims 1-12, wherein the REE binding protein comprises at least two EF-hand domain sequences.

14. The method of claim 13, wherein the REE binding protein comprises at least three or at least four EF-hand domain sequences.

15. The method of claim 13, wherein the at least two EF-hand domain sequences are different.

16. The method of any one of claims 1-15, wherein the REE binding protein is a lanthanide binding protein, a yttrium binding protein, and/or a scandium binding protein.

17. The method of claim 16, wherein the REE binding protein has at least 10%, 20%, 30%, 40%, 50%, 60%, 70%, 80%, 90%, or 100% higher lanthanide binding affinity relative to a control protein, wherein the control protein comprises SEQ ID NO: 2 or SEQ ID NO: 3.

18. The method of claim 17, wherein the binding affinity is determined using a dialysis assay.

19. The method of any one of claims 16-18, wherein the lanthanide is selected from the group consisting of cerium (Ce), dysprosium (Dy), erbium (Er), europium (Eu), gadolinium (Gd), holmium (Ho), lanthanum (La), lutetium (Lu), neodymium (Nd), praseodymium (Pr), promethium (Pm), samarium (Sm), terbium (Tb), thulium (Tm), ytterbium (Yb), and a combination thereof.

20. The method of any one of claims 1-19, wherein the REE binding protein has at least 10%, 20%, 30%, 40%, 50%, 60%, 70%, 80%, 90%, or 100% lower iron binding affinity relative to a control protein, wherein the control protein is TRFE_HUMAN2 (SEQ ID NO: 298) or TRFE_BOVIN2 (SEQ ID NO: 299).

21. The method of claim 20, wherein the binding affinity is determined using a dialysis assay.

22. The method of any one of claims 1-21, wherein the REE binding protein is expressed as a heterologous gene in a host cell.

23. The method of claim 22, wherein the REE binding protein is secreted from the host cell.

24. The method of any one of claims 1-23, wherein the REE-binding protein comprises a sequence that is at least 90% identical to any one of SEQ ID NOs: 4-71.

25. The method of claim 24, wherein the REE-binding protein comprises any one of SEQ ID NOs: 4-71.

26. The method of any one of claims 1-25, wherein the REE-binding protein does not comprise SEQ ID NO: 1.

27. The method of any one of claims 1-26, wherein the REE-binding protein does not comprise SEQ ID NO: 2 or SEQ ID NO: 3.

28. The method of any one of claims 1-27, wherein the REE-binding protein comprises at least 90% identity to the portion of a sequence selected from any one of SEQ ID NOs: 4-71 outside of the EF hand domains within the sequence, and wherein the REE binding protein comprises no more than two amino acid substitutions relative to the EF-hand domain(s) within the sequence.

29. A host cell comprising a heterologous gene expressing a rare earth element (REE) binding protein, wherein the REE binding protein comprises an EF-hand domain, wherein the REE binding protein does not comprise SEQ ID NO: 1.

30. The host cell of claim 29, wherein the EF-hand domain comprises the sequence:
X₁X₂X₃X₄X₅X₆X₇X₈X₉X₁₀X₁₁X₁₂ (SEQ ID NO: 1275),
wherein X denotes any amino acid;
wherein X₁ is D or K;
wherein X₂ is A, D, E, F, G, H, I, K, L, P, Q, R, S, T, V, or Y;
wherein X₃ is D, E, N, Q, S, or T;
wherein X₄ is A, D, E, G, H, K, L, N, Q, R, S, or T;
wherein X₅ is D, N, S, or T;
wherein X₆ is A, E, G, K, N, Q, R, or S;
wherein X₇ is A, D, E, F, G, H, I, K, L, M, N, Q, R, S, T, V, or Y;
wherein X₈ is A, F, I, L, M, or V;
wherein X₉ is A, D, E, G, L, N, Q, S, T, or V;
wherein X₁₀ is A, D, E, F, G, H, I, K, L, M, N, P, Q, R, S, T, V, or Y;
wherein X₁₁ is A, D, E, F, G, I, K, L, M, N, Q, R, S, T, V, or Y; and
wherein X₁₂ is A, D, E, G, I, K, L, Q, R, S, T, or V.

31. The host cell of claim 30, wherein the EF-hand domain additionally comprises X₁₃,
wherein X₁₃ is A, E, F, G, H, I, L, M, Q, R, S, T, V, W, or Y.

32. The host cell of claim 29, wherein the EF-hand domain comprises the sequence:
DX₁X₂X₃X₄X₅X₆X₇X₈X₉X₁₀X₁₁ (SEQ ID NO: 1276),
wherein X₁ is A, D, F, G, I, K, L, P, Q, R, S, T, V, or Y;
wherein X₂ is D, N, Q, or S;
wherein X₃ is A, D, G, H, K, N, Q, R, or S;
wherein X₄ is D, N, or S;
wherein X₅ is A, E, G, K, N, Q, or R;
wherein X₆ is A, D, E, F, H, I, K, L, M, N, Q, R, S, T, V, or Y;
wherein X₇ is A, F, I, L, or V;
wherein X₈ is D, E, G, N, S, T, or V;
wherein X₉ is A, D, E, F, G, H, I, K, L, M, N, P, Q, R, S, T, V, or Y;
wherein X₁₀ is A, D, E, F, G, I, K, L, N, Q, R, S, T, V, or Y; and
wherein X₁₁ is A, D, E, G, L, Q, R, S, T, or V.

33. The host cell of claim 32, wherein the EF-hand domain additionally comprises X₁₂,
wherein X₁₂ is A, E, F, G, H, I, L, M, Q, R, S, V, W, or Y.

34. The host cell of claim 29, wherein the EF-hand domain comprises the sequence:
DX₁X₂X₃X₄X₅X₆X₇X₈X₉X₁₀X₁₁ (SEQ ID NO: 1277),
wherein X₁ is A, D, F, G, I, K, L, Q, R, S, T, V, or Y;
wherein X₂ is D, N, Q, or S;
wherein X₃ is A, D, G, H, K, N, Q, R, or S;
wherein X₄ is D, N, or S;
wherein X₅ is A, E, G, K, N, Q, or R;
wherein X₆ is A, D, E, F, H, I, K, L, M, N, Q, R, S, T, V, or Y;
wherein X₇ is A, F, I, L, or V;
wherein X₈ is D, E, G, N, S, T, or V;
wherein X₉ is A, D, E, F, G, H, I, K, L, M, N, P, Q, R, S, T, V, or Y;
wherein X₁₀ is A, D, E, F, G, I, K, L, N, Q, R, S, T, V, or Y; and
wherein X₁₁ is A, D, E, G, L, Q, R, S, T, or V.

35. The host cell of claim 34, wherein the EF-hand domain additionally comprises X₁₂,
wherein X₁₂ is A, E, F, G, H, I, L, M, Q, R, S, V, W, or Y.

36. The host cell of any one of claims 26-35, wherein the EF-hand domain comprises no more than two amino acid substitutions relative to a sequence selected from the EF-hand domain sequences in Table 2, corresponding to SEQ ID NOs: 300-977.

37. The host cell of claim 36, wherein the EF-hand domain comprises a sequence selected from the EF-hand domain sequences in Table 2, corresponding to SEQ ID NOs: 300-977.

38. The host cell of claim 37, wherein the EF-hand domain comprises a sequence selected from SEQ ID NOs: 304-715.

39. The host cell of claim 38, wherein the EF-hand domain comprises a sequence selected from SEQ ID NOs: 304-473.

40. The host cell of any one of claims 29-39, wherein the REE binding protein comprises at least two EF-hand domain sequences.

41. The host cell of claim 40, wherein the REE binding protein comprises at least three or at least four EF-hand domain sequences.

42. The host cell of claim 40, wherein the at least two EF-hand domain sequences are different.

43. The host cell of any one of claims 29-42, wherein the REE binding protein is a lanthanide binding protein, a yttrium binding protein, and/or a scandium binding protein.

44. The host cell of claim 43, wherein the REE binding protein has at least 10%, 20%, 30%, 40%, 50%, 60%, 70%, 80%, 90%, or 100% higher lanthanide binding affinity relative to a control protein, wherein the control protein comprises SEQ ID NO: 2 or SEQ ID NO: 3.

45. The host cell of claim 44, wherein the binding affinity is determined using a dialysis assay.

46. The host cell of any one of claims 43-45, wherein the lanthanide is selected from the group consisting of cerium (Ce), dysprosium (Dy), erbium (Er), europium (Eu), gadolinium (Gd), holmium (Ho), lanthanum (La), lutetium (Lu), neodymium (Nd), praseodymium (Pr), promethium (Pm), samarium (Sm), terbium (Tb), thulium (Tm), ytterbium (Yb), and a combination thereof.

47. The host cell of any one of claims 29-46, wherein the REE binding protein has at least 10%, 20%, 30%, 40%, 50%, 60%, 70%, 80%, 90%, or 100% lower iron binding affinity relative to a control protein, wherein the control protein is TRFE_HUMAN2 (SEQ ID NO: 298) or TRFE_BOVIN2 (SEQ ID NO: 299).

48. The host cell of claim 47, wherein the iron binding affinity is determined using a dialysis assay.

49. The host cell of any one of claims 29-48, wherein the REE-binding protein comprises a sequence that is at least 90% identical to any one of SEQ ID NOs: 4-71.

50. The host cell of claim 49, wherein the REE-binding protein comprises any one of SEQ ID NOs: 4-71.

51. The host cell of any one of claims 29-50, wherein the REE-binding protein does not comprise SEQ ID NO: 2 or SEQ ID NO: 3.

52. The host cell of any one of claims 29-51, wherein the REE-binding protein comprises at least 90% identity to the portion of a sequence selected from any one of SEQ ID NOs: 4-71 outside of the EF hand domains within the sequence, and wherein the REE binding protein comprises no more than two amino acid substitutions relative to the EF-hand domain(s) within the sequence.

53. A kit comprising a host cell of any one of claims 29-50 and instructions for extraction of a rare earth element.

54. A kit comprising a rare earth element (REE) binding protein, wherein the REE binding protein comprises an EF-hand domain, and instructions for extraction of a rare earth element.

55. The kit of claim 53 or 54, wherein the rare earth element is lanthanide, scandium, and/or yttrium.

56. The kit of any one of claims 53-55, wherein the REE binding protein comprises a sequence that is at least 90% identical to any one of SEQ ID NOs: 4-71.

57. The kit of claim 56, wherein the REE binding protein comprises any one of SEQ ID NOs: 4-71.
